(19) United States
(12) Patent Application Publication
(10) Pub. No.: US 2009/0275021 A1
(43) Pub. Date: Nov. 5, 2009

(54) NOVEL NUCLEOTIDE AND AMINO ACID SEQUENCES, AND ASSAYS AND METHODS OF USE THEREOF FOR DIAGNOSIS

(76) Inventors: Osnat Sella-Tavor, Kfar-Kish (IL); Sarah Pollock, Tel-Aviv (IL); Lily Bazak, Givatayim (IL); Elena Tsypkin, Tel-Aviv (IL); Shira Wallach, Hod-hasharon (IL); Eve Montia, Rehovot (IL); Shirley Sameah-Greenwald, Kfar Saba (IL)

Correspondence Address: FENNEMORE CRAIG, 3003 NORTH CENTRAL AVENUE, SUITE 2600, PHOENIX, AZ, 85012, US

(21) Appl. No.: 12/095,110

(22) PCT Filed: Nov. 27, 2006
(86) PCT No.: PCT/IL06/01365

§ 371 Date: Dec. 9, 2008

Related U.S. Application Data
(60) Provisional application No. 60/751,378, filed on Dec. 19, 2005.

(30) Foreign Application Priority Data
Nov. 27, 2005 (IL) 172204
Jan. 16, 2006 (IL) 173173
Aug. 1, 2006 (IL) 177215
Dec. 8, 2006 (IL) 172460

(51) Int. Cl. C12Q 1/68; C12N 15/11; C07K 14/00; C07K 16/18; C12N 15/00; C07H 21/04; C12N 5/06; C12P 21/02; G01N 33/53

(52) U.S. Cl. 435/6; 536/23.5; 530/350; 530/387.9; 435/320.1; 435/325; 435/69.1; 435/7.23; 536/24.33

(57) ABSTRACT

Novel splice variants, amino acid sequences and nucleotide sequences thereof, and methods of using same.

### FIELD OF THE INVENTION

[0001] The present invention is related to novel nucleotide acid sequences, and assays and methods of use thereof.

### BACKGROUND OF THE INVENTION

[0002] Diagnostic markers are important for early diagnosis of many diseases, as well as predicting response to treatment, monitoring treatment and determining prognosis of such diseases.

[0003] Nucleic Acid Testing (NAT) is a subset of molecular diagnostic markers, based on testing for the presence of a nucleic acid sequence in a sample, associated with a certain condition (most often a clinical pathology). The sample could be a body fluid, a tissue sample, a body secretion or any other sample obtained from a patient which could contain the targeted nucleic acids.

[0004] Traditionally, NAT diagnosis has been used for the diagnosis of infectious diseases. Particularly, it has been used for the diagnosis of HIV, Hepatitis C Virus (HCV), Hepatitis B Virus (HBV), Chlamydia trachomatis, Neisseria gonorrhoeae and Mycobacteria tuberculosis. In recent years NAT diagnosis has expanded to noninfectious diseases, for example, for the diagnosis of prostate cancer based on DD3 (PCA3). DD3 (PCA3) is a very prostate cancer-specific gene. It has shown a great diagnostic value for prostate cancer by measuring quantitavely the DD3 (PCA3) transcript in urine sediments obtained after prostatic massage. DD3 (PCA3) is a non-coding transcript, therefore diagnosis in the protein level is not possible. More NAT markers for more cancers in addition to prostate cancer are currently pursued.

[0005] NAT diagnostic markers have at least four advantages on protein based diagnostic modalities:

1) They are likely to be more sensitive and specific (as has been shown for diagnostic kits for HIV and HCV). This finding could be related to at least two things:
a. The test analyte could be amplified (e.g. with PCR)
b. The detection method is sequence specific rather than epitope specific
2) They allow diagnosis even if a differentially expressed transcript is non-coding (as in the case of DD3(PCA3))
3) The research tools for the discovery of novel NAT markers are much more advanced and robust than for protein markers (e.g. advanced DNA chip technology compared with protein chip technology)
4) NAT analytes are sometimes found in body secretions and/or body fluids and therefore could replace the need for a tissue biopsy when a serum marker is not available.

[0006] However, NAT markers suffer from a few disadvantages including:

1) The analyte itself is quite an unstable molecule (certainly when compared with a protein).
2) The analyte itself is by nature not physiologically secreted, therefore it is not always easily found in samples.

[0007] NAT markers development for noninfectious diseases was not pursued for a long time, which was mostly a result of expensive and not fully developed detection methods on one hand and intellectual property barriers on the other. With the advance in technology and expiration of key patents in the field, the industry is investing more and more resources in that direction and it seems that NAT based tests are going to be much more prevalent for noninfectious diseases in the future.

[0008] Another example of diagnostic markers which are used for diagnosis of many different diseases are serum markers. Such serum markers typically encompass secreted proteins and/or peptides; however, some serum markers may be released to the blood upon tissue lysis, such as from myocardial infarction (for example Troponin-I). Serum markers can also be used as risk factors for disease (for example base-line levels of CRP, as a predictor of cardiovascular disease), to monitor disease activity and progression (for example, determination of CRP levels to monitor acute phase inflammatory response) and to predict and monitor drug response (for example, as shredded fragments of the protein Erb-B2).

[0009] Immunohistochemistry (IHC) is the study of distribution of an antigen of choice in a sample based on specific antibody-antigen binding, typically on tissue slices. The antibody features a label which can be detected, for example as a stain which is detectable under a microscope. The tissue slices are prepared by being fixed. IHC is therefore particularly suitable for antibody-antigen reactions that are not disturbed or destroyed by the process of fixing the tissue slices.

[0010] IHC permits determining the localization of binding, and hence mapping of the presence of the antigen within the tissue and even within different compartments in the cell. Such mapping can provide useful diagnostic information, including:

1) the histological type of the tissue sample
2) the presence of specific cell types within the sample
3) information on the physiological and/or pathological state of cells (e.g. which phase of the cell-cycle they are in)
4) the presence of disease related changes within the sample
5) differentiation between different specific disease subtypes where it is already known the tissue is of disease state (for example, the differentiation between different tumor types when it is already known the sample was taken from cancerous tissue).
IHC information is valuable for more than diagnosis. It can also be used to determine prognosis and therapy treatment (as in the case of HER-2 in breast cancer) and monitor disease.

[0011] IHC protein markers could be from any cellular location. Most often these markers are membrane proteins but secreted proteins or intracellular proteins (including intranuclear) can be used as an IHC marker too.

[0012] IHC has at least two major disadvantages. It is performed on tissue samples and therefore a tissue sample has to be collected from the patient, which most often requires invasive procedures like biopsy associated with pain, discomfort, hospitalization and risk of infection. In addition, the interpretation of the result is observer dependant and therefore subjective. There is no measured value but rather only an estimation (on a scale of 1-4) of how prevalent the antigen on target is.

### SUMMARY OF THE INVENTION

[0013] The present invention provides, in different embodiments, many novel nucleic acid and amino acid sequences, which may optionally be used as diagnostic markers.

[0014] In some embodiments the present invention overcomes deficiencies of the background art by providing novel variants that are suitable for use with NAT and/or nucleic acid hybridization methods and assays, which may optionally be used as diagnostic markers. Collectively, methods and assays that are suitable for detecting a nucleic acid sequence (oligonucleotides) are referred to herein as “oligonucleotide detection technologies”, including but not limited to NAT and hybridization technologies. The markers of the present invention may optionally be used with any such oligonucleotide detection technology.

[0015] In some embodiments, the present invention provides a number of different variants of known proteins, which are expressed in serum and may optionally be used as diagnostic markers, which in some embodiments, are serum markers, or in other embodiments, are IHC markers. The present invention therefore overcomes the many deficiencies of the background art with regard to the need to obtain tissue samples and subjective interpretations of results. In one embodiment, tissue specific markers are identifible in serum or plasma. In some embodiments, a simple blood test can provide qualitative and/or quantitative indicators for expression of a desired marker, for example, serving as an indicator for various diseases and/or pathological conditions. The markers presented in the present invention can also potentially be used for in-vivo imaging applications.

[0016] The diseases for which such variants may be useful as diagnostic markers are described in greater detail below. The variants themselves are described by “cluster” or by gene, as these variants are splice variants of known proteins. In some embodiments, the term “marker-detectable disease” refers to a disease that may be detected by a particular marker, with regard to the description of such diseases below. In some embodiments, the markers of the present invention, alone or in combination, show a high degree of differential detection between disease and non-disease states.

[0017] The present invention therefore also relates to diagnostic assays for disease detection optionally and preferably in a sample taken from a subject (patient), which is more preferably some type of blood sample or body secretion sample. The assays are optionally NAT (nucleic acid amplification technology)-based assays, such as PCR for example (or variations thereof such as real-time PCR for example). The assays may also optionally encompass nucleic acid hybridization assays. The assays may optionally be qualitative or quantitative.

[0018] The present invention relates, in some embodiments, to diagnostic assays for disease detection, which in some embodiments, utilizes a biological sample taken from a subject (patient), which for example may comprise a body fluid or secretion including but not limited to seminal plasma, blood, serum, urine, prostatic fluid, seminal fluid, semen, the external secretions of the skin, respiratory, intestinal, and genitourinary tracts, tears, cerebrospinal fluid, sputum, saliva, milk, peritoneal fluid, pleural fluid, cyst fluid, secretions of the breast ductal system (and/or lavage thereof), broncho alveolar lavage, lavage of the reproductive system, lavage of any other part of the body or system in the body, samples of any organ including but not limited to lung, colon, ovarian and/or breast tissue, stool or a tissue sample, or any combination thereof. In some embodiments, the term encompasses samples of in vivo cell culture constituents. The sample can optionally be diluted with a suitable eluant before contacting the sample to an antibody and/or performing any other diagnostic assay.

[0019] In some embodiments of the present invention, nucleic acids, or polypeptides, having a sequence as described herein, or homologues thereof.

[0020] In some embodiments, the terms “homology”, “homologue” or “homologous”, in any instance, indicate that the sequence referred to, whether an amino acid sequence, or a nucleic acid sequence, exhibits, in one embodiment at least 70% correspondence with the indicated sequence. In another embodiment, the amino acid sequence or nucleic acid sequence exhibits at least 72% correspondence with the indicated sequence. In another embodiment, the amino acid sequence or nucleic acid sequence exhibits at least 75% correspondence with the indicated sequence. In another embodiment, the amino acid sequence or nucleic acid sequence exhibits at least 77% correspondence with the indicated sequence. In another embodiment, the amino acid sequence or nucleic acid sequence exhibits at least 80% correspondence with the indicated sequence. In another embodiment, the amino acid sequence or nucleic acid sequence exhibits at least 82% correspondence with the indicated sequence. In another embodiment, the amino acid sequence or nucleic acid sequence exhibits at least 85% correspondence with the indicated sequence. In another embodiment, the amino acid sequence or nucleic acid sequence exhibits at least 87% correspondence with the indicated sequence. In another embodiment, the amino acid sequence or nucleic acid sequence exhibits at least 90% correspondence with the indicated sequence. In another embodiment, the amino acid sequence or nucleic acid sequence exhibits at least 92% correspondence with the indicated sequence. In another embodiment, the amino acid sequence or nucleic acid sequence exhibits at least 95% or more correspondence with the indicated sequence. In another embodiment, the amino acid sequence or nucleic acid sequence exhibits 95%-100% correspondence to the indicated sequence. Similarly, in some embodiments, the reference to a correspondence to a particular sequence includes both direct correspondence, as well as homology to that sequence as herein defined.

[0021] In some embodiments, this invention provides an isolated polynucleotide comprising a nucleic acid having a sequence corresponding to, or homologous to that set forth in SEQ ID NOs: 1-3, 87-92, 155-158, 187-193, 334, 346, 421, 440-449.

[0022] In some embodiments, this invention provides an isolated polynucleotide segment comprising a nucleic acid having a sequence corresponding to, or homologous to that set forth in SEQ ID NOs: 4-28, 53-72, 93-132, 159-172, 194-204, 347-349, 450-461, 481-484.

[0023] In some embodiments, this invention provides an isolated protein or polypeptide having an amino acid sequence corresponding to, or homologous to that set forth in SEQ ID NOs: 33-36, 140, 142-144, 183-186, 213-214, 217, 355, 469-471, 474-475.

[0024] In some embodiments, the proteins or polypeptides of this invention comprise chimeric protein or polypeptides.

[0025] In some embodiments, the terms “chimeric protein or polypeptide”, or “chimera” refers to an assembly or a string of amino acids in a particular sequence, or nucleotides encoding the same, respectively, which does not correspond to the sequence of the known (wild type) polypeptide or protein, or nucleic acid, respectively. In some embodiments, the variants of this invention are derived by the by the assembly or stringing of amino acids or polynucleotides encoding the same, from two exons, or an exon and an intron, or fragments thereof, or segments having sequences with the indicated homology.

[0026] In some embodiments, the isolated chimeric proteins or polypeptides of the invention may comprise an amino acid sequence corresponding to or homologous to that set forth in SEQ ID NO: 33-36, 139-144, 183-186, 213-217, 355, 469-476.

[0027] In some embodiments, such isolated chimeric proteins or polypeptides may comprise an amino acid sequence corresponding to or homologous to that set forth in AA383349_P4 (SEQ ID NO: 33).

[0028] In some embodiments, the isolated chimeric proteins or polypeptides of the invention may comprise an amino acid sequence corresponding to or homologous to that as set forth in AA383349_P4 (SEQ ID NO: 33), comprising a amino acid sequence being at least about 90% homologous to amino acids 151-440 of Q96EZ7_HUMAN (SEQ ID NO: 30), which also corresponds to amino acids 1-290 of AA383349_P4 (SEQ ID NO: 33).

[0029] In some embodiments, the isolated chimeric proteins or polypeptides of the invention may comprise an amino acid sequence corresponding to or homologous to that as set forth in AA383349_P4 (SEQ ID NO: 33), comprising a first amino acid sequence being at least about 90% homologous to amino acids 1-17 of NP_{—}005158 (SEQ ID NO: 31), which also corresponds to amino acids 1-17 of AA383349_P4 (SEQ ID NO: 33), a second amino acid sequence being at least about 70%, optionally at least about 80%, preferably at least about 85%, more preferably at least about 90% and most preferably at least about 95% homologous to a polypeptide having the sequence VEILQDPSPPPLCLPTTPGTPDSSDPSHLLGPQSCWSSQ (SEQ ID NO: 494) corresponding to amino acids 18-56 of AA383349_P4 (SEQ ID NO: 33), and a third amino acid sequence being at least about 90% homologous to amino acids 18-251 of NP_{—}005158 (SEQ ID NO: 31), which also corresponds to amino acids 57-290 of AA383349_P4 (SEQ ID NO: 33), wherein said first amino acid sequence, second amino acid sequence and third amino acid sequence are contiguous and in a sequential order.

[0030] In some embodiments, this invention provides an isolated polypeptide encoding for an edge portion of AA383349_P4 (SEQ ID NO: 33), comprising an amino acid sequence being at least about 70%, optionally at least about 80%, preferably at least about 85%, more preferably at least about 90% and most preferably at least about 95% homologous to the sequence VEILQDPSPPPLCLPTTPGTPDSSDPSHLLGPQSCWSSQ (SEQ ID NO: 494) of AA383349_P4 (SEQ ID NO: 33).

[0031] In some embodiments, such isolated chimeric proteins or polypeptides may comprise an amino acid sequence corresponding to or homologous to that set forth in AA383349_P5 (SEQ ID NO: 34).

[0032] In some embodiments, the isolated chimeric proteins or polypeptides of the invention may comprise an amino acid sequence corresponding to or homologous to that as set forth in AA383349_P5 (SEQ ID NO: 34), comprising a amino acid sequence being at least about 90% homologous to amino acids 1-457 of Q6DKJ7_HUMAN (SEQ ID NO:429), which also corresponds to amino acids 1-457 of AA383349_P5 (SEQ ID NO: 34).

[0033] In some embodiments, the isolated chimeric proteins or polypeptides of the invention may comprise an amino acid sequence corresponding to or homologous to that as set forth in AA383349_P5 (SEQ ID NO: 34), comprising a first amino acid sequence being at least about 70%, optionally at least 80%, preferably at least 85%, more preferably at least 90% and most preferably at least 95%, homologous to a polypeptide having the sequence MLNRVRSAVAHLVSSGG (SEQ ID NO: 495) corresponding to amino acids 1-17 of AA383349_P5 (SEQ ID NO: 34), and a second amino acid sequence being at least about 90% homologous to amino acids 1-440 of Q96EZ7_HUMAN (SEQ ID NO: 30), which also corresponds to amino acids 18-457 of AA383349_P5 (SEQ ID NO: 34), wherein said first amino acid sequence and second amino acid sequence are contiguous and in a sequential order.

[0034] In some embodiments, this invention provides an isolated polypeptide encoding for a head of AA383349_P5 (SEQ ID NO: 34), comprising a polypeptide being at least 70%, optionally at least about 80%, preferably at least about 85%, more preferably at least about 90% and most preferably at least about 95% homologous to the sequence MLNRVRSAVAHLVSSGG (SEQ ID NO: 495) of AA383349_P5 (SEQ ID NO: 34).

[0035] In some embodiments, the isolated chimeric proteins or polypeptides of the invention may comprise an amino acid sequence corresponding to or homologous to that as set forth in AA383349_P5 (SEQ ID NO: 34), comprising a first amino acid sequence being at least about 70%, optionally at least 80%, preferably at least 85%, more preferably at least 90% and most preferably at least 95%, homologous to a polypeptide having the sequence MLNRVRSAVAHLVSSGGAPPPRPKSPDLPNAASAPPAAAPEAPRSPPAKAGSGSATPAKAVEARASFSRPT FLQLSPGGLRRADDHAGRAVQSPPDTGRRLPWSTGYAEVINAGKSRHNEDQACCEVVYVEGRRSVTGVP REPSRGQGLCFYYWGLFDGHAGGGAAE (SEQ ID NO: 496) corresponding to amino acids 1-167 of AA383349_P5 (SEQ ID NO: 34), a second amino acid sequence being at least about 90% homologous to amino acids 1-17 of NP_{—}005158 (SEQ ID NO: 31), which also corresponds to amino acids 168-184 of AA383349_P5 (SEQ ID NO: 34), a third amino acid sequence being at least about 70%, optionally at least 80%, preferably at least 85%, more preferably at least 90% and most preferably at least 95% homologous to a polypeptide having the sequence VEILQDPSPPPLCLPTTPGTPDSSDPSHLLGPQSCWSSQ (SEQ ID NO: 494) corresponding to amino acids 185-223 of AA383349_P5 (SEQ ID NO: 34), and a fourth amino acid sequence being at least about 90% homologous to amino acids 18-251 of NP_{—}005158 (SEQ ID NO: 31), which also corresponds to amino acids 224-457 of AA383349_P5 (SEQ ID NO: 34), wherein said first amino acid sequence, second amino acid sequence, third amino acid sequence and fourth amino acid sequence are contiguous and in a sequential order.

[0036] In some embodiments, this invention provides an isolated polypeptide encoding for a head of AA383349_P5 (SEQ ID NO: 34), comprising a polypeptide being at least 70%, optionally at least about 80%, preferably at least about 85%, more preferably at least about 90% and most preferably at least about 95% homologous to the sequence

(SEQ ID NO: 496) of AA383349_P5 (SEQ ID NO: 34)

MLNRVRSAVAHLVSSGGAPPPRPKSPDLPNAASAPPAAAPEAPRSPPAKA
GSGSATPAKAVEARASFSRPTFLQLSPGGLRRADDHAGRAVQSPPDTGRR
LPWSTGYAEVINAGKSRHNEDQACCEVVYVEGRRSVTGVPREPSRGQGLC
FYYWGLFDGHAGGGAAE.

[0037] In some embodiments, this invention provides an isolated polypeptide encoding for an edge portion of AA383349_P5 (SEQ ID NO: 34), comprising an amino acid sequence being at least about 70%, optionally at least about 80%, preferably at least about 85%, more preferably at least about 90% and most preferably at least about 95% homologous to the sequence VEILQDPSPPPLCLPTTPGTPDSSDPSHLLGPQSCWSSQ (SEQ ID NO: 494) of AA383349_P5 (SEQ ID NO: 34).

[0038] In some embodiments, such isolated chimeric proteins or polypeptides may comprise an amino acid sequence corresponding to or homologous to that set forth in AA383349_P12 (SEQ ID NO: 36).

[0039] In some embodiments, the isolated chimeric proteins or polypeptides of the invention may comprise an amino acid sequence corresponding to or homologous to that as set forth in AA383349_P12 (SEQ ID NO: 36), comprising a first amino acid sequence being at least about 90% homologous to amino acids 1-349 of Q6DKJ7_HUMAN (SEQ ID NO:429), which also corresponds to amino acids 1-349 of AA383349_P12 (SEQ ID NO: 36), and a second amino acid sequence LG corresponding to amino acids 350-351 of AA383349_P12 (SEQ ID NO: 36), wherein said first amino acid sequence and second amino acid sequence are contiguous and in a sequential order.

[0040] In some embodiments, the isolated chimeric proteins or polypeptides of the invention may comprise an amino acid sequence corresponding to or homologous to that as set forth in AA383349_P12 (SEQ ID NO: 36), comprising a first amino acid sequence being at least about 70%, optionally at least 80%, preferably at least 85%, more preferably at least 90% and most preferably at least 95%, homologous to a polypeptide having the sequence MLNRVRSAVAHLVSSGG (SEQ ID NO: 495) corresponding to amino acids 1-17 of AA383349_P12 (SEQ ID NO: 36), a second amino acid sequence being at least about 90% homologous to amino acids 1-332 of Q96EZ7_HUMAN (SEQ ID NO: 30), which also corresponds to amino acids 18-349 of AA383349_P12 (SEQ ID NO: 36), and a third amino acid sequence LG corresponding to amino acids 350-351 of AA383349_P12 (SEQ ID NO: 36), wherein said first amino acid sequence, second amino acid sequence and third amino acid sequence are contiguous and in a sequential order.

[0041] In some embodiments, this invention provides an isolated polypeptide encoding for a head of AA383349_P12 (SEQ ID NO: 36), comprising a polypeptide being at least 70%, optionally at least about 80%, preferably at least about 85%, more preferably at least about 90% and most preferably at least about 95% homologous to the sequence MLNRVRSAVAHLVSSGG (SEQ ID NO: 495) of AA383349_P12 (SEQ ID NO: 36).

[0042] In some embodiments, the isolated chimeric proteins or polypeptides of the invention may comprise an amino acid sequence corresponding to or homologous to that as set forth in H13410_P4 (SEQ ID NO: 139), comprising a first amino acid sequence being at least about 90% homologous to amino acids 1-515 of Q6UXG2_HUMAN (SEQ ID NO: 137), which also corresponds to amino acids 1-515 of H13410_P4 (SEQ ID NO: 139), and a second amino acid sequence being at least about 70%, optionally at least 80%, preferably at least 85%, more preferably at least 90% and most preferably at least 95% homologous to a polypeptide having the sequence VRFPFFAR (SEQ ID NO: 499) corresponding to amino acids 516-523 of H13410_P4 (SEQ ID NO: 139), wherein said first amino acid sequence and second amino acid sequence are contiguous and in a sequential order.

[0043] In some embodiments, this invention provides an isolated polypeptide encoding for an edge portion of H13410_P4 (SEQ ID NO: 139), comprising an amino acid sequence being at least about 70%, optionally at least about 80%, preferably at least about 85%, more preferably at least about 90% and most preferably at least about 95% homologous to the sequence VRFPFFAR (SEQ ID NO: 499) of H13410_P4 (SEQ ID NO: 139).

[0044] In some embodiments, such isolated chimeric proteins or polypeptides may comprise an amino acid sequence corresponding to or homologous to that set forth in H13410_P8 (SEQ ID NO: 140).

[0045] In some embodiments, the isolated chimeric proteins or polypeptides of the invention may comprise an amino acid sequence corresponding to or homologous to that as set forth in H13410_P8 (SEQ ID NO: 140), comprising a first amino acid sequence being at least about 90% homologous to amino acids 1-876 of Q6UXG2_HUMAN (SEQ ID NO: 137), which also corresponds to amino acids 1-876 of H13410_P8 (SEQ ID NO: 140), and a second amino acid sequence being at least about 70%, optionally at least 80%, preferably at least 85%, more preferably at least 90% and most preferably at least 95% homologous to a polypeptide having the sequence VGFPLIGHFHERREWEI (SEQ ID NO: 500) corresponding to amino acids 877-893 of H13410_P8 (SEQ ID NO: 140), wherein said first amino acid sequence and second amino acid sequence are contiguous and in a sequential order.

[0046] In some embodiments, this invention provides an isolated polypeptide encoding for an edge portion of H13410_P8 (SEQ ID NO: 140), comprising an amino acid sequence being at least about 70%, optionally at least about 80%, preferably at least about 85%, more preferably at least about 90% and most preferably at least about 95% homologous to the sequence VGFPLIGHFHERREWEI (SEQ ID NO: 500) of H13410_P8 (SEQ ID NO: 140).

[0047] In some embodiments, the isolated chimeric proteins or polypeptides of the invention may comprise an amino acid sequence corresponding to or homologous to that as set forth in H13410_P8 (SEQ ID NO: 140), comprising a first amino acid sequence being at least about 90% homologous to amino acids 1-622 of NP_{—}065826 (SEQ ID NO:344), which also corresponds to amino acids 1-622 of H13410_P8 (SEQ ID NO: 140), a bridging amino acid P corresponding to amino acid 623 of H13410_P8 (SEQ ID NO: 140), a second amino acid sequence being at least about 90% homologous to amino acids 624-876 of NP_{—}065826 (SEQ ID NO:344), which also corresponds to amino acids 624-876 of H13410_P8 (SEQ ID NO: 140), and a third amino acid sequence being at least about 70%, optionally at least 80%, preferably at least 85%, more preferably at least 90% and most preferably at least 95% homologous to a polypeptide having the sequence VGFPLIGHFHERREWEI (SEQ ID NO: 500) corresponding to amino acids 877-893 of H13410_P8 (SEQ ID NO: 140), wherein said first amino acid sequence, bridging amino acid, second amino acid sequence and third amino acid sequence are contiguous and in a sequential order.

[0048] In some embodiments, the isolated chimeric proteins or polypeptides of the invention may comprise an amino acid sequence corresponding to or homologous to that as set forth in H13410_P8 (SEQ ID NO: 140), comprising a first amino acid sequence being at least about 70%, optionally at least 80%, preferably at least 85%, more preferably at least 90% and most preferably at least 95%, homologous to a polypeptide having the sequence MAEPGHSHHLSARVRGRTERRIPRLWRLLLWAGTAFQVTQGTGPELHACKESEYHYEYTACDSTGSRWR VAVPHTPGLCTSLPDPVKGTEC SFSCNAGEFLDMKDQSCKPCAEGRYSLGTGIRFDEWDELPHGFASL SAN MELDDSAAESTGNCTSSKWVPRGDYIASNTDECTATLMYAVNLKQSGTVNFEYYYPDSSIIFEFFVQNDQ CQPNADDSRWMKTTEKGWEFHSVELNRGNNVLYWRTTAFSVW KVPKPVLVRNIAITGVAYTSECFPCK PGTYADKQGSSFCKLCPANSYSNKGETSCHQCDPDKYSEKGSSSCNVRPACTDKDYFYTHTACDANGET QL (SEQ ID NO: 501) corresponding to amino acids 1-350 of H13410_P8 (SEQ ID NO: 140), a second amino acid sequence being at least about 90% homologous to amino acids 1-526 of Q8N1G3_HUMAN (SEQ ID NO: 136), which also corresponds to amino acids 351-876 of H13410_P8 (SEQ ID NO: 140), and a third amino acid sequence being at least about 70%, optionally at least 80%, preferably at least 85%, more preferably at least 90% and most preferably at least 95% homologous to a polypeptide having the sequence VGFPLIGHFHERREWEI (SEQ ID NO: 500) corresponding to amino acids 877-893 of H13410_P8 (SEQ ID NO: 140), wherein said first amino acid sequence, second amino acid sequence and third amino acid sequence are contiguous and in a sequential order.

[0049] In some embodiments, this invention provides an isolated polypeptide encoding for a head of H13410_P8 (SEQ ID NO: 140), comprising a polypeptide being at least 70%, optionally at least about 80%, preferably at least about 85%, more preferably at least about 90% and most preferably at least about 95% homologous to the sequence

(SEQ ID NO: 501)

MAEPGHSHHLSARVRGRTERRIPRLWRLLLWAGTAFQVTQGTGPELHACK
ESEYHYEYTACDSTGSRWRVAVPHTPGLCTSLPDPVKGTECSFSCNAGEF
LDMKDQSCKPCAEGRYSLGTGIRFDEWDELPHGFASLSANMELDDSAAES
TGNCTSSKWVPRGDYIASNTDECTATLMYAVNLKQSGTVNFEYYYPDSSI
IFEFFVQNDQCQPNADDSRWMKTTEKGWEFHSVELNRGNNVLYWRTTAFS
VWTKVPKPVLVRNIAITGVAYTSECFPCKPGTYADKQGSSFCKLCPANSY
SNKGETSCHQCDPDKYSEKGSSSGNVRPACTDKDYFYTHTACDANGETQL
of

(SEQ ID NO: 140)

H13410_P8.

[0050] In some embodiments, the isolated chimeric proteins or polypeptides of the invention may comprise an amino acid sequence corresponding to or homologous to that as set forth in H13410_P8 (SEQ ID NO: 140), comprising a first amino acid sequence being at least about 70%, optionally at least 80%, preferably at least 85%, more preferably at least 90% and most preferably at least 95%, homologous to a polypeptide having the sequence MAEPGHSHHLSARVRGRTERRIPRLWRLLLWAGTAFQVTQGTGPELHACKESEYHYEYTACDSTGSRWR VAVPHTPGLCTSLPDPVKGTECSFSCNAGEFLDMKDQSCKPCAEGRYSLGTGIRFDEWDELPHGFASLSAN MELDDSAAESTGNCTSSKWVPRGDYIASNTDECTATLMYAVNLKQSGTVNFEYYYPDSSIIFEFFVQNDQ CQPNADDSRWMKTTEKGWEFHSVELNRGNNVLYWRTTAFSVWTKVPKPVLVRNIAITGVAYTSECFPCK PGTYADKQGSSFCKLCPANSYSNKGETSCHQCDPDKYSEKGSSSCNVRPACTDKDYFYTHTACDANGET QL (SEQ ID NO: 501) corresponding to amino acids 1-350 of H13410_P8 (SEQ ID NO: 140), a second amino acid sequence being at least about 90% homologous to amino acids 1-272 of Q5T5C9_HUMAN (SEQ ID NO: 138), which also corresponds to amino acids 351-622 of H13410_P8 (SEQ ID NO: 140), a bridging amino acid P corresponding to amino acid 623 of H13410_P8 (SEQ ID NO: 140), a third amino acid sequence being at least about 90% homologous to amino acids 274-526 of Q5T5C9_HUMAN (SEQ ID NO: 138), which also corresponds to amino acids 624-876 of H13410_P8 (SEQ ID NO: 140), and a fourth amino acid sequence being at least about 70%, optionally at least 80%, preferably at least 85%, more preferably at least 90% and most preferably at least 95% homologous to a polypeptide having the sequence VGFPLIGHFHERREWEI (SEQ ID NO: 500) corresponding to amino acids 877-893 of H13410_P8 (SEQ ID NO: 140), wherein said first amino acid sequence, second amino acid sequence, bridging amino acid, third amino acid sequence and fourth amino acid sequence are contiguous and in a sequential order.

[0051] In some embodiments, the isolated chimeric proteins or polypeptides of the invention may comprise an amino acid sequence corresponding to or homologous to that as set forth in H13410_P8 (SEQ ID NO: 140), comprising a first amino acid sequence being at least about 70%, optionally at least 80%, preferably at least 85%, more preferably at least 90% and most preferably at least 95%, homologous to a polypeptide having the sequence MAEPGHSHHLSARVRGRTERRIPRLWRLLLWAGTAFQVTQGTGPELHACKESEYHYEYTACDSTGSRWR VAVPHTPGLCTSLPDPVKGTECSFSCNAGEFLDMKDQSCKPCAEGRYSLGTGIRFDEWDELPHGFASLSAN MELDDSAAESTGNCTSSKWVPRGDYIASNTDECTATLMYAVNLKQSGTVNFEYYYPDSSIIFEFFVQNDQ CQPNADDSRWMKTTEKGWEFHSVELNRGNNVLYWRTTAFSVWTKVPKPVLVRNIAITGVAYTSECFPCK PGTYADKQGSSFCKLCPANSYSNKGETSCHQCDPDKYSEKGSSSCNVRPACTDKDYFYTHTACDANGET QLMYKWAKPKICSEDLEGAVKLPASGVKTHCPPCNPGFFKTNNSTCQPCPYGSYSNGSDCTRCPAGTEPA VGFEYK (SEQ ID NO: 502) corresponding to amino acids 1-424 of H13410_P8 (SEQ ID NO: 140), a second amino acid sequence being at least about 90% homologous to amino acids 1-452 of Q9P2M2_HUMAN (SEQ ID NO: 135), which also corresponds to amino acids 425-876 of H13410_P8 (SEQ ID NO: 140), and a third amino acid sequence being at least about 70%, optionally at least 80%, preferably at least 85%, more preferably at least 90% and most preferably at least 95% homologous to a polypeptide having the sequence VGFPLIGHFHERREWEI (SEQ ID NO: 500) corresponding to amino acids 877-893 of H13410_P8 (SEQ ID NO: 140), wherein said first amino acid sequence, second amino acid sequence and third amino acid sequence are contiguous and in a sequential order.

[0052] In some embodiments, this invention provides an isolated polypeptide encoding for a head of H13410_P8 (SEQ ID NO: 140), comprising a polypeptide being at least 70%, optionally at least about 80%, preferably at least about 85%, more preferably at least about 90% and most preferably at least about 95% homologous to the sequence

(SEQ ID NO: 502)

MAEPGHSHHLSARVRGRTERRIPRLWRLLLWAGTAFQVTQGTGPELHACK
ESEYHYEYTACDSTGSRWRVAVPHTPGLCTSLPDPVKGTECSFSCNAGEF
LDMKDQSCKPCAEGRYSLGTGIRFDEWDELPHGFASLSANMELDDSAAES
TGNCTSSKWVPRGDYIASNTDECTATLMYAVNLKQSGTVNFEYYYPDSSI
IFEFFVQNDQCQPNADDSRWMKTTEKGWEFHSVELNRGNNVLYWRTTAFS
VWTKVPKPVLVRNIAITGVAYTSECFPCKPGTYADKQGSSFCKLCPANSY
SNKGETSCHQCDPDKYSEKGSSSCNVRPACTDKDYFYTHTACDANGETQL
MYKWAKPKICSEDLEGAVKLPASGVKTHCPPCNPGFFKTNNSTCQPCPYG
SYSNGSDCTRCPAGTEPAVGFEYK
of

(SEQ ID NO: 140)

H13410_P8.

[0053] In some embodiments, the isolated chimeric proteins or polypeptides of the invention may comprise an amino acid sequence corresponding to or homologous to that as set forth in H13410_P9 (SEQ ID NO: 141), comprising a first amino acid sequence being at least about 90% homologous to amino acids 1-936 of Q6UXG2_HUMAN (SEQ ID NO: 137), which also corresponds to amino acids 1-936 of H13410_P9 (SEQ ID NO: 141), and a second amino acid sequence being at least about 70%, optionally at least 80%, preferably at least 85%, more preferably at least 90% and most preferably at least 95% homologous to a polypeptide having the sequence YMLRYWSVGOMDRVGLLIRENI (SEQ ID NO: 503) corresponding to amino acids 937-957 of H13410_P9 (SEQ ID NO: 141), wherein said first amino acid sequence and second amino acid sequence are contiguous and in a sequential order.

[0054] In some embodiments, this invention provides an isolated polypeptide encoding for an edge portion of H13410_P9 (SEQ ID NO: 141), comprising an amino acid sequence being at least about 70%, optionally at least about 80%, preferably at least about 85%, more preferably at least about 90% and most preferably at least about 95% homologous to the sequence YMLRYWSVGMDRVGLLIRENI (SEQ ID NO: 503) of H13410_P9 (SEQ ID NO: 141).

[0055] In some embodiments, the isolated chimeric proteins or polypeptides of the invention may comprise an amino acid sequence corresponding to or homologous to that as set forth in H13410_P9 (SEQ ID NO: 141), comprising a first amino acid sequence being at least about 90% homologous to amino acids 1-622 of NP_{—}065826 (SEQ ID NO:344), which also corresponds to amino acids 1-622 of H13410_P9 (SEQ ID NO: 141), a bridging amino acid P corresponding to amino acid 623 of H13410_P9 (SEQ ID NO: 141), a second amino acid sequence being at least about 90% homologous to amino acids 624-936 of NP_{—}065826 (SEQ ID NO:344), which also corresponds to amino acids 624-936 of H13410_P9 (SEQ ID NO: 141), and a third amino acid sequence being at least about 70%, optionally at least 80%, preferably at least 85%, more preferably at least 90% and most preferably at least 95% homologous to a polypeptide having the sequence YMLRYWSVGMDRVGLLIRENI (SEQ ID NO: 503) corresponding to amino acids 937-957 of H13410_P9 (SEQ ID NO: 141), wherein said first amino acid sequence, bridging amino acid, second amino acid sequence and third amino acid sequence are contiguous and in a sequential order.

[0056] In some embodiments, the isolated chimeric proteins or polypeptides of the invention may comprise an amino acid sequence corresponding to or homologous to that as set forth in H13410_P9 (SEQ ID NO: 141), comprising a first amino acid sequence being at least about 70%, optionally at least 80%, preferably at least 85%, more preferably at least 90% and most preferably at least 95%, homologous to a polypeptide having the sequence MAEPGHSHHLSARVRGRTERRIPRLWRLLLWAGTAFQVTQGTGPELHACKESEYHYEYTACDSTGSRWR VAVPHTPGLCTSLPDPVKGTECSFSCNAGEFLDMKDQSCKPCAEGRYSLGTGIRFDEWDELPHGFASLSAN MELDDSAAESTGNCTSSKWVPRGDYIASNTDECTATLMYAVNLKQSGTVNFEYYYPDSSIIFEFFVQNDQ CQPNADDSRWMKTTEKGWEFHSVELNRGNNVLYWRTTAFSVWTKVPKPVLVRNIAITGVAYTSECFPCK PGTYADKQGSSFCKLCPANSYSNKGETSCHQCDPDKYSEKGSSSCNVRPACTDKDYFYTHTACDANGET QL (SEQ ID NO: 501) corresponding to amino acids 1-350 of H13410_P9 (SEQ ID NO: 141), a second amino acid sequence being at least about 90% homologous to amino acids 1-586 of Q8N1G3_HUMAN (SEQ ID NO: 136), which also corresponds to amino acids 351-936 of H13410_P9 (SEQ ID NO: 141), and a third amino acid sequence being at least about 70%, optionally at least 80%, preferably at least 85%, more preferably at least 90% and most preferably at least 95% homologous to a polypeptide having the sequence YMLRYWSVGMDRVGLLIRENI (SEQ ID NO: 503) corresponding to amino acids 937-957 of H13410_P9 (SEQ ID NO: 141), wherein said first amino acid sequence, second amino acid sequence and third amino acid sequence are contiguous and in a sequential order.

[0057] In some embodiments, the isolated chimeric proteins or polypeptides of the invention may comprise an amino acid sequence corresponding to or homologous to that as set forth in H13410_P9 (SEQ ID NO: 141), comprising a first amino acid sequence being at least about 70%, optionally at least 80%, preferably at least 85%, more preferably at least 90% and most preferably at least 95%, homologous to a polypeptide having the sequence MAEPGHSHHLSARVRGRTERRIPRLWRLLLWAGTAFQVTQGTGPELHACKESEYHYEYTACDSTGSRWR VAVPHTPGLCTSLPDPVKGTECSFSCNAGEFLDMKDQSCKPCAEGRYSLGTGIRFDEWDELPHGFASLSAN MELDDSAAESTGNCTSSKWVPRGDYIASNTDECTATLMYAVNLKQSGTVNFEYYYPDSSIIFEFFVQNDQ CQPNADDSRWMKTTEKGWEFHSVELNRGNNVLYWRTTAFSVWTKVPKPVLVRNIAITGVAYTSECFPCK PGTYADKQGSSFCKLCPANSYSNKGETSCHQCDPDKYSEKGSSSCNVRPACTDKDYFYTHTACDANGET QL (SEQ ID NO: 501) corresponding to amino acids 1-350 of H13410_P9 (SEQ ID NO: 141), a second amino acid sequence being at least about 90% homologous to amino acids 1-272 of Q5T5C9_HUMAN (SEQ ID NO: 138), which also corresponds to amino acids 351-622 of H13410_P9 (SEQ ID NO: 141), a bridging amino acid P corresponding to amino acid 623 of H13410_P9 (SEQ ID NO: 141), a third amino acid sequence being at least about 90% homologous to amino acids 274-586 of Q5T5C9_HUMAN (SEQ ID NO: 138), which also corresponds to amino acids 624-936 of H13410_P9 (SEQ ID NO: 141), and a fourth amino acid sequence being at least about 70%, optionally at least 80%, preferably at least 85%, more preferably at least 90% and most preferably at least 95% homologous to a polypeptide having the sequence YMLRYWSVGMDRVGLLIRENI (SEQ ID NO: 503) corresponding to amino acids 937-957 of H13410_P9 (SEQ ID NO: 141), wherein said first amino acid sequence, second amino acid sequence, bridging amino acid, third amino acid sequence and fourth amino acid sequence are contiguous and in a sequential order.

[0058] In some embodiments, the isolated chimeric proteins or polypeptides of the invention may comprise an amino acid sequence corresponding to or homologous to that as set forth in H13410_P9 (SEQ ID NO: 141), comprising a first amino acid sequence being at least about 70%, optionally at least 80%, preferably at least 85%, more preferably at least 90% and most preferably at least 95%, homologous to a polypeptide having the sequence MEPGHSHHILSARVRGRTERRIPRLWRLLLWAGTAFQVTQGTGPELHACKESEYHYEYTACDSTGSRWR VAVPHTPGLCTSLPDPVKGTECSFSCNAGEFLDMKDQSCKPCAEGRYSLGTGIRFDEWDELPHGFASLSAN MELDDSAAESTGNCTSSKWVPRGDYIASNTDECTATLMYAVNLKQSGTVNFEYYYPDSSIIFEFFVQNDQ CQPNADDSRWMKTTEKGWEFHSVELNRGNNVLYWRTTAFSVWTKVPKPVLVRNIAITGVAYTSECFPCK PGTYADKQGSSFCKLCPANSYSNKGETSCHQCDPDKYSEKGSSSCNVRPACTDKDYFYTHTACDANGET QLMYKWAKPKICSEDLEGAVKLPASGVKTHCPPCNPGFFKTNNSTCQPCPYGSYSNGSDCTRCPAGTEPA VGFEYK (SEQ ID NO: 502) corresponding to amino acids 1-424 of H13410_P9 (SEQ ID NO: 141), a second amino acid sequence being at least about 90% homologous to amino acids 1-512 of Q9P2M2_HUMAN (SEQ ID NO: 135), which also corresponds to amino acids 425-936 of H13410_P9 (SEQ ID NO: 141), and a third amino acid sequence being at least about 70%, optionally at least 80%, preferably at least 85%, more preferably at least 90% and most preferably at least 95% homologous to a polypeptide having the sequence YMLRYWSVGMDRVGLLIRENI (SEQ ID NO: 503) corresponding to amino acids 937-957 of H13410_P9 (SEQ ID NO: 141), wherein said first amino acid sequence, second amino acid sequence and third amino acid sequence are contiguous and in a sequential order.

[0059] In some embodiments, this invention provides an isolated polypeptide encoding for a head of H13410_P9 (SEQ ID NO: 141), comprising a polypeptide being at least 70%, optionally at least about 80%, preferably at least about 85%, more preferably at least about 90% and most preferably at least about 95% homologous to the sequence

(SEQ ID NO: 502) of H13410_P9 (SEQ ID NO: 141)

MAEPGHSHHLSARVRGRTERRIPRLWRLLLWAGTAFQVTQGTGPELHACK
ESEYHYEYTACDSTGSRWRVAVPHTPGLCTSLPDPVKGTECSFSCNAGEF
LDMKDQSCKPCAEGRYSLGTGIRFDEWDELPHGFASLSANMELDDSAAES
TGNCTSSKWVPRGDYIASNTDECTATLMYAVNLKQSGTVNFEYYYPDSSI
IFEFFVQNDQCQPNADDSRWMKTTEKGWEFHSVELNRGNNVLYWRTTAFS
VWTKVPKPVLVRNIAITGVAYTSECFPCKPGTYADKQGSSFCKLCPANSY
SNKGETSCHQCDPDKYSEKGSSSCNVRPACTDKDYFYTHTACDANGETQL
MYKWAKPKICSEDLEGAVKLPASGVKTHCPPCNPGFFKTNNSTCQPCPYG
SYSNGSDCTRCPAGTEPAVGFEYK.

[0060] In some embodiments, such isolated chimeric proteins or polypeptides may comprise an amino acid sequence corresponding to or homologous to that set forth in H61775_P18 (SEQ ID NO:355).

[0061] In some embodiments, the isolated chimeric proteins or polypeptides of the invention may comprise an amino acid sequence corresponding to or homologous to that as set forth in H61775_P18 (SEQ ID NO:355), comprising a first amino acid sequence being at least about 90% homologous to amino acids 1-33 of NP_{—}065840 (SEQ ID NO: 351), which also corresponds to amino acids 1-33 of H61775_P18 (SEQ ID NO:355), a bridging amino acid G corresponding to amino acid 34 of H61775_P18 (SEQ ID NO:355), a second amino acid sequence being at least about 90% homologous to amino acids 35-83 of NP_{—}065840 (SEQ ID NO: 351), which also corresponds to amino acids 35-83 of H61775_P18 (SEQ ID NO:355), and a third amino acid sequence being at least about 70%, optionally at least 80%, preferably at least 85%, more preferably at least 90% and most preferably at least 95% homologous to a polypeptide having the sequence

(SEQ ID NO: 505)

KSSPQVGGREVSARKVGWVESHKASYERLCPCSDLISSSAALTLLNKHGC
APKQC

corresponding to amino acids 84-138 of H61775_P18 (SEQ ID NO:355), wherein said first amino acid sequence, bridging amino acid, second amino acid sequence and third amino acid sequence are contiguous and in a sequential order.

[0062] In some embodiments, this invention provides an isolated polypeptide encoding for an edge portion of H61775_P18 (SEQ ID NO:355), comprising an amino acid sequence being at least about 70%, optionally at least about 80%, preferably at least about 85%, more preferably at least about 90% and most preferably at least about 95% homologous to the sequence

(SEQ ID NO: 355)

KSSPQVGGREVSARKVGWVESHKASYERLCPCSDLISSSAALTLLNKHGC
APKQC of H61775_P18.

[0063] In some embodiments, the isolated chimeric proteins or polypeptides of the invention may comprise an amino acid sequence corresponding to or homologous to that as set forth in H61775_P18 (SEQ ID NO:355), comprising a first amino acid sequence being at least about 90% homologous to amino acids 11-93 of Q9P2J2_HUMAN (SEQ ID NO: 352), which also corresponds to amino acids 1-83 of H61775_P18 (SEQ ID NO:355), and a second amino acid sequence being at least about 70%, optionally at least 80%, preferably at least 85%, more preferably at least 90% and most preferably at least 95% homologous to a polypeptide having the sequence KSSPQVGGREVSARKVGWVESHKASYERLCPCSDLISSSAALTLLNKHGCAPKQC (SEQ ID NO: 505) corresponding to amino acids 84-138 of H61775_P18 (SEQ ID NO:355), wherein said, first amino acid sequence and second amino acid sequence are contiguous and in a sequential order.

[0064] In some embodiments, such isolated chimeric proteins or polypeptides may comprise an amino acid sequence corresponding to or homologous to that set forth in HUMPAX8A_P33 (SEQ ID NO: 183).

[0065] In some embodiments, the isolated chimeric proteins or polypeptides of the invention may comprise an amino acid sequence corresponding to or homologous to that as set forth in HUMPAX8A_P33 (SEQ ID NO: 183), comprising a first amino acid sequence being at least about 90% homologous to amino acids 1-201 of Q06710-5 (SEQ ID NO: 178), which also corresponds to amino acids 1-201 of HUMPAX8A_P33 (SEQ ID NO: 183), and a second amino acid sequence being at least about 70%, optionally at least 80%, preferably at least 85%, more preferably at least 90% and most preferably at least 95% homologous to a polypeptide having the sequence ECWDRRAAGGAREQFAQALMGTETLPLMIWDFVGALHVTVTCPVPQLAKAPGPTWLALFLPPQ (SEQ ID NO: 506) corresponding to amino acids 202-264 of HUMPAX8A_P33 (SEQ ID NO: 183), wherein said first amino acid sequence and second amino acid sequence are contiguous and in a sequential order.

[0066] In some embodiments, this invention provides an isolated polypeptide encoding for an edge portion of HUMPAX8A_P33 (SEQ ID NO: 183), comprising an amino acid sequence being at least about 70%, optionally at least about 80%, preferably at least about 85%, more preferably at least about 90% and most preferably at least about 95% homologous to the sequence

(SEQ ID NO: 506)

ECWDRRAAGGAREQFAQALMGTETLPLMIWDFVGALHVTVTCPVPQLAKA
PGPTWLALFLPPQ
of

(SEQ ID NO: 183)

HUMPAX8A_P33.

[0067] In some embodiments, the isolated chimeric proteins or polypeptides of the invention may comprise an amino acid sequence corresponding to or homologous to that as set forth in HUMPAX8A_P36 (SEQ ID NO: 184), comprising a first amino acid sequence being at least about 90% homologous to amino acids 1-259 of PAX8_HUMAN (SEQ ID NO:422), which also corresponds to amino acids 1-259 of HUMPAX8A_P36 (SEQ ID NO: 184), and a second amino acid sequence being at least about 70%, optionally at least 80%, preferably at least 85%, more preferably at least 90% and most preferably at least 95% homologous to a polypeptide having the sequence VRSWALGGEQGGQGPEKVYSPNEPVLHQSSWKLHQWAQGTCLMQLQA (SEQ ID NO: 507) corresponding to amino acids 260-306 of HUMPAX8A_P36 (SEQ ID NO: 184), wherein said first amino acid sequence and second amino acid sequence are contiguous and in a sequential order.

[0068] In some embodiments, this invention provides an isolated polypeptide encoding for an edge portion of HUMPAX8A_P36 (SEQ ID NO: 184), comprising an amino acid sequence being at least about 70%, optionally at least about 80%, preferably at least about 85%, more preferably at least about 90% and most preferably at least about 95% homologous to the sequence

(SEQ ID NO: 507)

VRSWALGGEQGGQGPEKVYSPNEPVLHQSSWKLHQWAQGTCLMQLQA
of

(SEQ ID NO: 184)

HUMPAX8A_P36.

[0069] In some embodiments, such isolated chimeric proteins or polypeptides may comprise an amino acid sequence corresponding to or homologous to that set forth in HUMPAX8A_P37 (SEQ ID NO: 185).

[0070] In some embodiments, the isolated chimeric proteins or polypeptides of the invention may comprise an amino acid sequence corresponding to or homologous to that as set forth in HUMPAX8A_P37 (SEQ ID NO: 185), comprising a first amino acid sequence being at least about 90% homologous to amino acids 1-63 of PAX8_HUMAN (SEQ ID NO:422), which also corresponds to amino acids 1-63 of HUMPAX8A_P37 (SEQ ID NO: 185), a bridging amino acid S corresponding to amino acids 64 4 of HUMPAX8A_P37 (SEQ ID NO: 185), a second amino acid sequence being at least about 90% homologous to amino acids 64-259 of PAX8_HUMAN (SEQ ID NO:422), which also corresponds to amino acids 65-260 of HUMPAX8A_P37 (SEQ ID NO: 185), and a third amino acid sequence being at least about 70%, optionally at least 80%, preferably at least 85%, more preferably at least 90% and most preferably at least 95% homologous to a polypeptide having the sequence VRSWALGGEQGGQGPEKVYSPNEPVLHQSSWKLHQWAQGTCLMQLQA (SEQ ID NO: 507) corresponding to amino acids 261-307 of HUMPAX8A_P37 (SEQ ID NO: 185), wherein said first amino acid sequence, bridging amino acid, second amino acid sequence, and third amino acid sequence are contiguous and in a sequential order.

[0071] In some embodiments, such isolated chimeric proteins or polypeptides may comprise an amino acid sequence corresponding to or homologous to that set forth in T58132_P0 (SEQ ID NO: 213).

[0072] In some embodiments, the isolated chimeric proteins or polypeptides of the invention may comprise an amino acid sequence corresponding to or homologous to that as set forth in T58132_P0 (SEQ ID NO: 213), comprising a first amino acid sequence being at least about 70%, optionally at least 80%, preferably at least 85%, more preferably at least 90% and most preferably at least 95%, homologous to a polypeptide having the sequence AAWKAGSGSAGNCEADCEGKGALLSPPGFYHQKRGQTSII (SEQ ID NO: 508) corresponding to amino acids 1-40 of T58132_P0 (SEQ ID NO: 213), and a second amino acid sequence being at least about 90% homologous to amino acids 1-181 of Q6L9U4_HUMAN (SEQ ID NO:425), which also corresponds to amino acids 41-221 of T58132_P0 (SEQ ID NO: 213), wherein said first amino acid sequence and second amino acid sequence are contiguous and in a sequential order.

[0073] In some embodiments, this invention provides an isolated polypeptide encoding for a head of T58132_P0 (SEQ ID NO: 213), comprising a polypeptide being at least 70%, optionally at least about 80%, preferably at least about 85%, more preferably at least about 90% and most preferably at least about 95% homologous to the sequence

(SEQ ID NO: 508)

AAWKAGSGSAGNCEADCEGKGALLSPPGFYHQKRGQTSII
of

(SEQ ID NO: 213)

T58132_P0.

[0074] In some embodiments, the isolated chimeric proteins or polypeptides of the invention may comprise an amino acid sequence corresponding to or homologous to that as set forth in T58132_P0 (SEQ ID NO: 213), comprising a first amino acid sequence being at least about 70%, optionally at least 80%, preferably at least 85%, more preferably at least 90% and most preferably at least 95%, homologous to a polypeptide having the sequence AAWKAGSGSAGNCEADCEGKGALLSPPGFYHQKRGQTSII (SEQ ID NO: 508) corresponding to amino acids 1-40 of T58132_P0 (SEQ ID NO: 213), a second amino acid sequence being at least about 90% homologous to amino acids 1-82 of Q68G75_HUMAN (SEQ ID NO: 209), which also corresponds to amino acids 41-122 of T58132_P0 (SEQ ID NO: 213), a bridging amino acid E corresponding to amino acid 123 of T58132_P0 (SEQ ID NO: 213), and a third amino acid sequence being at least about 90% homologous to amino acids 84-181 of Q68G75_HUMAN (SEQ ID NO: 209), which also corresponds to amino acids 124-221 of T58132_P0 (SEQ ID NO: 213), wherein said first amino acid sequence, second amino acid sequence, bridging amino acid and third amino acid sequence are contiguous and in a sequential order.

[0075] In some embodiments, the isolated chimeric proteins or polypeptides of the invention may comprise an amino acid sequence corresponding to or homologous to that as set forth in T58132_P0 (SEQ ID NO: 213), comprising a first amino acid sequence being at least about 70%, optionally at least 80%, preferably at least 85%, more preferably at least 90% and most preferably at least 95%, homologous to a polypeptide having the sequence AAWKAGSGSAGNCEADCEGKGALLSPPGFYHQKRGQTSII (SEQ ID NO: 508) corresponding to amino acids 1-40 of T58132_P0 (SEQ ID NO: 213), a second amino acid sequence being at least about 90% homologous to amino acids 1-27 of Q6L9U2_HUMAN (SEQ ID NO: 212), which also corresponds to amino acids 41-67 of T58132_P0 (SEQ ID NO: 213), a third amino acid sequence being at least about 70%, optionally at least 80%, preferably at least 85%, more preferably at least 90% and most preferably at least 95% homologous to a polypeptide having the sequence PSTRKLYEKKLVQLLVSPPCAPPVMNGPRELDGAQDSDDSEE (SEQ ID NO: 509) corresponding to amino acids 68-109 of T58132_P0 (SEQ ID NO: 213), and a fourth amino acid sequence being at least about 90% homologous to amino acids 29-140 of Q6L9U2_HUMAN (SEQ ID NO: 212), which also corresponds to amino acids 110-221 of T58132_P0 (SEQ ID NO: 213), wherein said first amino acid sequence, second amino acid sequence, third amino acid sequence and fourth amino acid sequence are contiguous and in a sequential order.

[0076] In some embodiments, this invention provides an isolated polypeptide encoding for an edge portion of T58132_P0 (SEQ ID NO: 213), comprising an amino acid sequence being at least about 70%, optionally at least about 80%, preferably at least about 85%, more preferably at least about 90% and most preferably at least about 95% homologous to the sequence PSTRKLYEKKLVQLLVSPPCAPPVMNGPRELDGAQDSDDSEE (SEQ ID NO: 509) of T58132_P0 (SEQ ID NO: 213).

[0077] In some embodiments, such isolated chimeric proteins or polypeptides may comprise an amino acid sequence corresponding to or homologous to that set forth in T58132_P1 (SEQ ID NO: 214).

[0078] In some embodiments, the isolated chimeric proteins or polypeptides of the invention may comprise an amino acid sequence corresponding to or homologous to that as set forth in T58132_P1 (SEQ ID NO: 214), comprising a first amino acid sequence being at least about 70%, optionally at least 80%, preferably at least 85%, more preferably at least 90% and most preferably at least 95%, homologous to a polypeptide having the sequence AAWKAGSGSAGNCEADCEGKGALLSPPGFYHQKRGQTSII (SEQ ID NO: 508) corresponding to amino acids 1-40 of T58132_P1 (SEQ ID NO: 214), and a second amino acid sequence being at least about 90% homologous to amino acids 1-108 of NP_{—}001001552 (SEQ ID NO: 206), which also corresponds to amino acids 41-148 of T58132_P1 (SEQ ID NO: 214), wherein said first amino acid sequence and second amino acid sequence are contiguous and in a sequential order.

[0079] In some embodiments, the isolated chimeric proteins or polypeptides of the invention may comprise an amino acid sequence corresponding to or homologous to that as set forth in T58132_P12 (SEQ ID NO: 216), comprising a first amino acid sequence being at least about 90% homologous to amino acids 1-27 of Q6L9U4_HUMAN (SEQ ID NO:425), which also corresponds to amino acids 1-27 of T58132_P12 (SEQ ID NO: 216), a second bridging amino acid sequence comprising of Q, and a third amino acid sequence being at least about 90% homologous to amino acids 70-181 of Q6L9U4 HUMAN (SEQ ID NO:425), which also corresponds to amino acids 29-140 of T58132_P12 (SEQ ID NO: 216), wherein said first amino acid sequence, second amino acid sequence and third amino acid sequence are contiguous and in a sequential order.

[0080] In some embodiments, this invention provides an isolated polypeptide encoding for an edge portion of T58132_P12 (SEQ ID NO: 216), comprising a polypeptide having a length “n”, wherein n is at least about 10 amino acids in length, optionally at least about 20 amino acids in length, preferably at least about 30 amino acids in length, more preferably at least about 40 amino acids in length and most preferably at least about 50 amino acids in length, wherein at least 3 amino acids comprise LQL having a structure as follows (numbering according to T58132_P12 (SEQ ID NO: 216)): a sequence starting from any of amino acid numbers 27−x to 27; and ending at any of amino acid numbers 29+((n−3)−x), in which x varies from 0 to n−3.

[0081] In some embodiments, the isolated chimeric proteins or polypeptides of the invention may comprise an amino acid sequence corresponding to or homologous to that as set forth in T58132_P12 (SEQ ID NO: 216), comprising a first amino acid sequence being at least about 90% homologous to amino acids 1-27 of Q68G75_HUMAN (SEQ ID NO: 209), which also corresponds to amino acids 1-27 of T58132_P12 (SEQ ID NO: 216), a second bridging amino acid sequence comprising of Q, a third amino acid sequence being at least about 90% homologous to amino acids 70-82 of Q68G75_HUMAN (SEQ ID NO: 209), which also corresponds to amino acids 29-41 of T58132_P12 (SEQ ID NO: 216), a bridging amino acid E corresponding to amino acid 42 of T58132_P12 (SEQ ID NO: 216), and a fourth amino acid sequence being at least about 90% homologous to amino acids 84-181 of Q68G75_HUMAN (SEQ ID NO: 209), which also corresponds to amino acids 43-140 of T58132_P12 (SEQ ID NO: 216), wherein said first amino acid sequence, second amino acid sequence, third amino acid sequence, bridging amino acid and fourth amino acid sequence are contiguous and in a sequential order.

[0082] In some embodiments, such isolated chimeric proteins or polypeptides may comprise an amino acid sequence corresponding to or homologous to that set forth in T86235_P4 (SEQ ID NO:469).

[0083] In some embodiments, the isolated chimeric proteins or polypeptides of the invention may comprise an amino acid sequence corresponding to or homologous to that as set forth in T86235_P4 (SEQ ID NO:469), comprising a first amino acid sequence being at least about 90% homologous to amino acids 1-223 of TAST_HUMAN (SEQ ID NO: 463), which also corresponds to amino acids 1-223 of T86235_P4 (SEQ ID NO:469), a bridging amino acid R corresponding to amino acid 224 of T86235_P4 (SEQ ID NO:469), a second amino acid sequence being at least about 90% homologous to amino acids 225-388 of TAST_HUMAN (SEQ ID NO: 463), which also corresponds to amino acids 225-388 of T86235_P4 (SEQ ID NO:469), and a third amino acid sequence being at least about 70%, optionally at least 80%, preferably at least 85%, more preferably at least 90% and most preferably at least 95% homologous to a polypeptide having the sequence VSIRSFPLLRSLALCCQPGGPGV (SEQ ID NO: 510) corresponding to amino acids 389-411 of T86235_P4 (SEQ ID NO:469), wherein said first amino acid sequence, bridging amino acid, second amino acid sequence and third amino acid sequence are contiguous and in a sequential order.

[0084] In some embodiments, this invention provides an isolated polypeptide encoding for an edge portion of T86235_P4 (SEQ ID NO:469), comprising an amino acid sequence being at least about 70%, optionally at least about 80%, preferably at least about 85%, more preferably at least about 90% and most preferably at least about 95% homologous to the sequence VSIRSFPLLRSLALCCQPGGPGV (SEQ ID NO: 510) of T86235_P4 (SEQ ID NO:469).

[0085] In some embodiments, the isolated chimeric proteins or polypeptides of the invention may comprise an amino acid sequence corresponding to or homologous to that as set forth in T86235_P4 (SEQ ID NO:469), comprising a first amino acid sequence being at least about 90% homologous to amino acids 1-388 of Q8N5B2_HUMAN (SEQ ID NO: 467), which also corresponds to amino acids 1-388 of T86235_P4 (SEQ ID NO:469), and a second amino acid sequence being at least about 70%, optionally at least 80%, preferably at least 85%, more preferably at least 90% and most preferably at least 95% homologous to a polypeptide having the sequence VSIRSFPLLRSLALCCQPGGPGV (SEQ ID NO: 510) corresponding to amino acids 389-411 of T86235_P4 (SEQ ID NO:469), wherein said first amino acid sequence and second amino acid sequence are contiguous and in a sequential order.

[0086] In some embodiments, the isolated chimeric proteins or polypeptides of the invention may comprise an amino acid sequence corresponding to or homologous to that as set forth in T86235_P4 (SEQ ID NO:469), comprising a first amino acid sequence being at least about 90% homologous to amino acids 1-112 of Q6PJU7_HUMAN (SEQ ID NO: 439), which also corresponds to amino acids 1-112 of T86235_P4 (SEQ ID NO:469), and a second amino acid sequence being at least about 70%, optionally at least 80%, preferably at least 85%, more preferably at least 90% and most preferably at least 95% homologous to a polypeptide having the sequence EAPGTIEFVADPAALATILSGEGVKSCHLGRQPSLAKRVLVRGSQGGTTQRVQGVRASAYLAPRTPTHRLD PARASCFSRLEGPGPRGRTLCPQRLQALISPSGPSFHPSTRPSFQELRRETAGSSRTSVSQASGLLLETPVQPA FSLPKGEREVVTHSDEGGVASLGLAQRVPLRENREMSHTRDSHDSHLMPSPAPVAQPLPGHVVPCPSPFGR AQRVPSPGPPTLTSYSVLRRLTVQPKTRFTPMPSTPRVQQAQWLRGVSPQSCSEDPALPWVSIRSFPLLRSL ALCCQPGGPGV (SEQ ID NO: 511) corresponding to amino acids 113-411 of T86235_P4 (SEQ ID NO:469), wherein said first amino acid sequence and second amino acid sequence are contiguous and in a sequential order.

[0087] In some embodiments, this invention provides an isolated polypeptide encoding for an edge portion of T86235_P4 (SEQ ID NO:469), comprising an amino acid sequence being at least about 70%, optionally at least about 80%, preferably at least about 85%, more preferably at least about 90% and most preferably at least about 95% homologous to the sequence

(SEQ ID NO: 511)

EAPGTIEFVADPAALATILSGEGVKSCHLGRQPSLAKRVLVRGSQGGTTQ
RVQGVRASAYLAPRTPTHRLDPARASCFSRLEGPGPRGRTLCPQRLQALI
SPSGPSFHPSTRPSFQELRRETAGSSRTSVSQASGLLLETPVQPAFSLPK
GEREVVTHSDEGGVASLGLAQRVPLRENREMSHTRDSHDDHLMPSPAPVA
QPLPGHVVPCPSPFGRAQRVPSPGPPTLTSYSVLRRLTVQPKTRFTPMPS
TPRVQQAQWLRGVSPQSCSEDPALPWVSIRSFPLLRSLALCCQPGGPGV
of

(SEQ ID NO: 469)

T86235_P4.

[0088] In some embodiments, such isolated chimeric proteins or polypeptides may comprise an amino acid sequence corresponding to or homologous to that set forth in T86235_P5 (SEQ ID NO:470).

[0089] In some embodiments, the isolated chimeric proteins or polypeptides of the invention may comprise an amino acid sequence corresponding to or homologous to that as set forth in T86235_P5 (SEQ ID NO:470), comprising a first amino acid sequence being at least about 90% homologous to amino acids 1-223 of TAST_HUMAN (SEQ ID NO: 463), which also corresponds to amino acids 1-223 of T86235_P5 (SEQ ID NO:470), a bridging amino acid R corresponding to amino acid 224 of T86235_P5 (SEQ ID NO:470), a second amino acid sequence being at least about 90% homologous to amino acids 225-433 of TAST_HUMAN (SEQ ID NO: 463), which also corresponds to amino acids 225-433 of T86235_P5 (SEQ ID NO:470), and a third amino acid sequence being at least about 70%, optionally at least 80%, preferably at least 85%, more preferably at least 90% and most preferably at least 95% homologous to a polypeptide having the sequence VSLCGQQL (SEQ ID NO: 512) corresponding to amino acids 434-441 of T86235_P5 (SEQ ID NO:470), wherein said first amino acid sequence, bridging amino acid, second amino acid sequence and third amino acid sequence are contiguous and in a sequential order.

[0090] In some embodiments, this invention provides an isolated polypeptide encoding for an edge portion of T86235_P5 (SEQ ID NO:470), comprising an amino acid sequence being at least about 70%, optionally at least about 80%, preferably at least about 85%, more preferably at least about 90% and most preferably at least about 95% homologous to the sequence VSLCGQQL (SEQ ID NO: 512) of T86235_P5(SEQ ID NO:470).

[0091] In some embodiments, the isolated chimeric proteins or polypeptides of the invention may comprise an amino acid sequence corresponding to or homologous to that as set forth in T86235_P5 (SEQ ID NO:470), comprising a first amino acid sequence being at least about 90% homologous to amino acids 1-433 of Q8N5B2_HUMAN (SEQ ID NO: 467), which also corresponds to amino acids 1-433 of T86235_P5 (SEQ ID NO:470), and a second amino acid sequence being at least about 70%, optionally at least 80%, preferably at least 85%, more preferably at least 90% and most preferably at least 95% homologous to a polypeptide having the sequence VSLCGQQL (SEQ ID NO: 512) corresponding to amino acids 434-441 of T86235_P5 (SEQ ID NO:470), wherein said first amino acid sequence and second amino acid sequence are contiguous and in a sequential order.

[0092] In some embodiments, the isolated chimeric proteins or polypeptides of the invention may comprise an amino acid sequence corresponding to or homologous to that as set forth in T86235_P5 (SEQ ID NO:470), comprising a first amino acid sequence being at least about 90% homologous to amino acids 1-112 of Q6PJU7_HUMAN (SEQ ID NO: 439), which also corresponds to amino acids 1-112 of T86235_P5 (SEQ ID NO:470), and a second amino acid sequence being at least about 70%, optionally at least 80%, preferably at least 85%, more preferably at least 90% and most preferably at least 95% homologous to a polypeptide having the sequence EAPGTIEFVADPAALATILSGEGVKSCHLGRQPSLAKRVLVRGSQGGTTQRVQGVRASAYLAPRTPTHRLD PARASCFSRLEGPGPRGRTLCPQRLQALISPSGPSFHPSTRPSFQELRRETAGSSRTSVSQASGLLLETPVQPA FSLPKGEREVVTHSDEGGVASLGLAQRVPLRENREMSHTRDSHDSHLMPSPAPVAQPLPGHVVPCPSPFGR AQRVPSPGPPTLTSYSVLRRLTVQPKTRFTPMPSTPRVQQAQWLRGVSPQSCSEDPALPWEQVAVRLFDQE SCIRSLEGSGKPPVATPSGPHSNRTPSLQEVKIQVSLCGQQL (SEQ ID NO: 513) corresponding to amino acids 113-441 of T86235_P5 (SEQ ID NO:470), wherein said first amino acid sequence and second amino acid sequence are contiguous and in a sequential order.

[0093] In some embodiments, this invention provides an isolated polypeptide encoding for an edge portion of T86235_P5 (SEQ ID NO:470), comprising an amino acid sequence being at least about 70%, optionally at least about 80%, preferably at least about 85%, more preferably at least about 90% and most preferably at least about 95% homologous to the sequence

(SEQ ID NO: 513)

EAPGTIEFVADPAALATILSGEGVKSCHLGRQPSLAKRVLVRGSQGGTTQ
RVQGVRASAYLAPRTPTHRLDPARASCFSRLEGPGPRGRTLCPQRLQALI
SPSGPSFHPSTRPSFQELRRETAGSSRTSVSQASGLLLETPVQPAFSLPK
GEREVVTHSDEGGVASLGLAQRVPLRENREMSHTRDSHDSHLMPSPAPVA
QPLPGHVVPCPSPFGRAQRVPSPGPPTLTSYSVLRRLTVQPKTRFTPMPS
TPRVQQAQWLRGVSPQSCSEDPALPWEQVAVRLFDQESCIRSLEGSGKPP
VATPSGPHSNRTPSLQEVKIQVSLCGQQL
of

(SEQ ID NO: 470)

T86235_P5.

[0094] In some embodiments, such isolated chimeric proteins or polypeptides may comprise an amino acid sequence corresponding to or homologous to that set forth in T86235_P6 (SEQ ID NO:471).

[0095] In some embodiments, the isolated chimeric proteins or polypeptides of the invention may comprise an amino acid sequence corresponding to or homologous to that as set forth in T86235_P6 (SEQ ID NO:471), comprising a first amino acid sequence being at least about 90% homologous to amino acids 1-223 of TAST_HUMAN (SEQ ID NO: 463), which also corresponds to amino acids 1-223 of T86235_P6 (SEQ ID NO:471), a bridging amino acid R corresponding to amino acid 224 of T86235_P6 (SEQ ID NO:471), a second amino acid sequence being at least about 90% homologous to amino acids 225-576 of TAST_HUMAN (SEQ ID NO: 463), which also corresponds to amino acids 225-576 of T86235_P6 (SEQ ID NO:471), a third amino acid sequence being at least about 90% homologous to amino acids 606-699 of TAST_HUMAN (SEQ ID NO: 463), which also corresponds to amino acids 577-670 of T86235_P6 (SEQ ID NO:471), a fourth amino acid sequence being at least about 70%, optionally at least 80%, preferably at least 85%, more preferably at least 90% and most preferably at least 95% homologous to a polypeptide having the sequence GKELAGKECEHKRSSPHCELHTCPAPTPGNLMLPHLPPWPSLALPQEEGRGCTSSPVLLIGLAVGGGGGED STWWKYRTPDLPLNFPCPS (SEQ ID NO: 514) corresponding to amino acids 671-760 of T86235_P6 (SEQ ID NO:471), and a fifth amino acid sequence being at least about 90% homologous to amino acids 700-778 of TAST_HUMAN (SEQ ID NO: 463), which also corresponds to amino acids 761-839 of T86235_P6 (SEQ ID NO:471), wherein said first amino acid sequence, bridging amino acid, second amino acid sequence, third amino acid sequence, fourth amino acid sequence and fifth amino acid sequence are contiguous and in a sequential order.

[0096] In some embodiments, the isolated chimeric proteins or polypeptides of the invention may comprise an amino acid sequence corresponding to or homologous to that as set forth in an edge portion of T86235_P6 (SEQ ID NO:471), comprising a polypeptide having a length “n”, wherein n is at least about 10 amino acids in length, optionally at least about 20 amino acids in length, preferably at least about 30 amino acids in length, more preferably at least about 40 amino acids in length and most preferably at least about 50 amino acids in length, wherein at least two amino acids comprise EE, having a structure as follows: a sequence starting from any of amino acid numbers 576−x to 576; and ending at any of amino acid numbers 577+((n−2)−x), in which x varies from 0 to n−2.

[0097] In some embodiments, this invention provides an isolated polypeptide encoding for an edge portion of T86235_P6 (SEQ ID NO:471), comprising an amino acid sequence being at least about 70%, optionally at least about 80%, preferably at least about 85%, more preferably at least about 90% and most preferably at least about 95% homologous to the sequence

(SEQ ID NO: 514)

GKELAGKECEHKRSSPHCELHTCPAPTPGNLMLPHIPPWPSLALPQEEGR
GCTSSPVLLIGLAVGGGGGEDSTWWKYRTPDLPLNFPCPS
of

(SEQ ID NO: 471)

T86235_P6.

[0098] In some embodiments, the isolated chimeric proteins or polypeptides of the invention may comprise an amino acid sequence corresponding to or homologous to that as set forth in T86235_P6 (SEQ ID NO:471), comprising a first amino acid sequence being at least about 90% homologous to amino acids 1-576 of Q8N5B2_HUMAN (SEQ ID NO: 467), which also corresponds to amino acids 1-576 of T86235_P6 (SEQ ID NO:471), a second amino acid sequence being at least about 90% homologous to amino acids 606-699 of Q8N5B2_HUMAN (SEQ ID NO: 467), which also corresponds to amino acids 577-670 of T86235_P6 (SEQ ID NO:471), a third amino acid sequence being at least about 70%, optionally at least 80%, preferably at least 85%, more preferably at least 90% and most preferably at least 95% homologous to a polypeptide having the sequence GKELAGKECEHKRSSPHCELHTCPAPTPGNLMLPHLPPWPSLALPQEEGRGCTSSPVLLIGLAVGGGGGED STWWKYRTPDLPLNFPCPS (SEQ ID NO: 514) corresponding to amino acids 671-760 of T86235_P6 (SEQ ID NO:471), and a fourth amino acid sequence being at least about 90% homologous to amino acids 700-778 of Q8N5B2_HUMAN (SEQ ID NO: 467), which also corresponds to amino acids 761-839 of T86235_P6 (SEQ ID NO:471), wherein said first amino acid sequence, second amino acid sequence, third amino acid sequence and fourth amino acid sequence are contiguous and in a sequential order.

[0099] In some embodiments, the isolated chimeric proteins or polypeptides of the invention may comprise an amino acid sequence corresponding to or homologous to that as set forth in an edge portion of T86235_P6 (SEQ ID NO:471), comprising a polypeptide having a length “n”, wherein n is at least about 10 amino acids in length, optionally at least about 20 amino acids in length, preferably at least about 30 amino acids in length, more preferably at least about 40 amino acids in length and most preferably at least about 50 amino acids in length, wherein at least two amino acids comprise EE, having a structure as follows: a sequence starting from any of amino acid numbers 576−x to 576; and ending at any of amino acid numbers 577+((n−2)−x), in which x varies from 0 to n−2.

[0100] In some embodiments, the isolated chimeric proteins or polypeptides of the invention may comprise an amino acid sequence corresponding to or homologous to that as set forth in T86235_P6 (SEQ ID NO:471), comprising a first amino acid sequence being at least about 90% homologous to amino acids 1-112 of Q6PJU7_HUMAN (SEQ ID NO: 439), which also corresponds to amino acids 1-112 of T86235_P6 (SEQ ID NO:471), and a second amino acid sequence being at least about 70%, optionally at least 80%, preferably at least 85%, more preferably at least 90% and most preferably at least 95% homologous to a polypeptide having the sequence EAPGTIEFVADPAALATILSGEGVKSCHLGRQPSLAKRVLVRGSQGGTTQRVQGVRASAYLAPRTPTHRLD PARASCFSRLEGPGPRGRTLCPQRLQALISPSGPSFHPSTRPSFQELRRETAGSSRTSVSQASGLLLETPVQPA FSLPKGEREVVTHSDEGGVASLGLAQRVPLRENREMSHTRDSHDSHLMPSPAPVAQPLPGHVVPCPSPFGR AQRVPSPGPPTLTSYSVLRRLTVQPKTRFTPMPSTPRVQQAQWLRGVSPQSCSEDPALPWEQVAVRLFDQE SCIRSLEGSGKPPVATPSGPHSNRTPSLQEVKIQRIGILQQLLRQEVEGLVGGQCVPLNGGSSLDMVELQPL LTEISRTLNATEHNSGTSHLPGLLKHSGLPKPCLPEECGEPQPCPPAEPGPPEAFCRSEPEIPEPSLQEQLEVP EPYPPAEPRPLESCCRSEPEIPESSRQEQLEEQLEVPEPCPPAEPGPLQPSTQGQSGPPGPCPRVELGASEPCT LEHRSLESSLPPCCSQWAPATTSLIFSSQHPLCASPPICSLQSLRPPAGQAGKELAGKECEHKRSSPHCELHT CPAPTPGNLMLPHLPPWPSLALPQEEGRGCTSSPVLLIGLAVGGGGGEDSTWWKYRTPDLPLNFPCPSGLS NLAPRTLALRERLKSCLTAIHCFBEARLDDECAFYTSRAPPSGPTRVCTNPVATLLEWQDALCFIPVGSAAP QGSP (SEQ ID NO: 515) corresponding to amino acids 113-839 of T86235_P6 (SEQ ID NO:471), wherein said first amino acid sequence and second amino acid sequence are contiguous and in a sequential order.

[0101] In some embodiments, this invention provides an isolated polypeptide encoding for an edge portion of T86235_P6 (SEQ ID NO:471), comprising an amino acid sequence being at least about 70%, optionally at least about 80%, preferably at least about 85%, more preferably at least about 90% and most preferably at least about 95% homologous to the sequence

(SEQ ID NO: 515)

EAPGTIEFVADPAALATILSGEGVKSCHLGRQPSLAKRVLVRGSQGGTTQ
RVQGVRASAYLAPRTPTHRLDPARASCFSRLEGPGPRGRTLCPQRLQALI
SPSGPSFHPSTRPSFQELRRETAGSSRTSVSQASGLLLETPVQPAFSLPK
GEREVVTHSDEGGVASLGLAQRVPLRENREMSHTRDSHDSHLMPSPAPVA
QPLPGHVVPCPSPFGRAQRVPSPGPPTLTSYSVLRRLTVQPKTRFTPMPS
TPRVQQAQWLRGVSPQSCSEDPALPWEQVAVRLFDQESCIRSLEGSGKPP
VATPSGPHSNRTPSLQEVKIQRIGILQQLLRQEVEGLVGGQCVPLNGGSS
LDMVELQPLLTEISRTLNATEHNSGTSHLPGLLKHSGLPKPCLPEECGEP
QPCPPAEPGPPEAFCRSEPEIPEPSLQEQLEVPEPYPPAEPRPLESCCRS
EPEIPESSRQEQLEEQLEVPEPCPPAEPGPLQPSTQGQSGPPGPCPRVEL
GASEPCTLEHRSLESSLPPCCSQWAPATTSLIFSSQHPLCASPPICSLQS
LRPPAGQAGKELAGKECEHKRSSPHCELHTCPAPTPGNLMLPHLPPWPSL
ALPQEEGRGCTSSPVLLIGLAVGGGGGEDSTWWKYRTPDLPLNFPCPSGL
SNLAPRTLALRERLKSCLTAIHCFHEARLDDECAFYTSRAPPSGPTRVCT
NPVATLLEWQDALCFIPVGSAAPQGSP
of

(SEQ ID NO: 471)

T86235_P6.

[0102] In some embodiments, the isolated chimeric proteins or polypeptides of the invention may comprise an amino acid sequence corresponding to or homologous to that as set forth in T86235_P7 (SEQ ID NO:472), comprising a first amino acid sequence being at least about 90% homologous to amino acids 1-223 of TAST_HUMAN (SEQ ID NO: 463), which also corresponds to amino acids 1-223 of T86235_P7 (SEQ ID NO:472), a bridging amino acid R corresponding to amino acid 224 of T86235_P7 (SEQ ID NO:472), a second amino acid sequence being at least about 90% homologous to amino acids 225-699 of TAST_HUMAN (SEQ ID NO: 463), which also corresponds to amino acids 225-699 of T86235_P7 (SEQ ID NO:472), a third amino acid sequence being at least about 70%, optionally at least 80%, preferably at least 85%, more preferably at least 90% and most preferably at least 95% homologous to a polypeptide having the sequence GKELAGKECEHKRSSPHCELHTCPAPTPGNLMLPHLPPWPSLALPQEEGRGCTSSPVLLIGLAVGGGGGED STWWKYRTPDLPLNFPCPS (SEQ ID NO: 514) corresponding to amino acids 700-789 of T86235_P7 (SEQ ID NO:472), and a fourth amino acid sequence being at least about 90% homologous to amino acids 700-778 of TAST_HUMAN (SEQ ID NO: 463), which also corresponds to amino acids 790-868 of T86235_P7 (SEQ ID NO:472), wherein said first amino acid sequence, bridging amino acid, second amino acid sequence, third amino acid sequence and fourth amino acid sequence are contiguous and in a sequential order.

[0103] In some embodiments, this invention provides an isolated polypeptide encoding for an edge portion of T86235_P7 (SEQ ID NO:472), comprising an amino acid sequence being at least about 70%, optionally at least about 80%, preferably at least about 85%, more preferably at least about 90% and most preferably at least about 95% homologous to the sequence

(SEQ ID NO: 514)

GKELAGKECEHKRSSPHCELHTCPAPTPGNLMLPHLPPWPSLALPQEEGR
GCTSSPVLLIGLAVGGGGGEDSTWWKYRTPDLPLNFPCPS
of

(SEQ ID NO: 472)

T86235_P7.

[0104] In some embodiments, the isolated chimeric proteins or polypeptides of the invention may comprise an amino acid sequence corresponding to or homologous to that as set forth in T86235_P7 (SEQ ID NO:472), comprising a first amino acid sequence being at least about 90% homologous to amino acids 1-699 of Q8N5B2_HUMAN (SEQ ID NO: 467), which also corresponds to amino acids 1-699 of T86235_P7 (SEQ ID NO:472), a second amino acid sequence being at least about 70%, optionally at least 80%, preferably at least 85%, more preferably at least 90% and most preferably at least 95% homologous to a polypeptide having the sequence GKELAGKECEHKRSSPHCELHTCPAPTPGNLMLPHLPPWPSLALPQEEGRGCTSSPVLLIGLAVGGGGGED STWWKYRTPDLPLNFPCPS (SEQ ID NO: 514) corresponding to amino acids 700-789 of T86235_P7 (SEQ ID NO:472), and a third amino acid sequence being at least about 90% homologous to amino acids 700-778 of known protein(s) □8N5B2_HUMAN (SEQ ID NO: 467), which also corresponds to amino acids 790-868 of T86235_P7 (SEQ ID NO:472), wherein said first amino acid sequence, second amino acid sequence and third amino acid sequence are contiguous and in a sequential order.

[0105] In some embodiments, this invention provides an isolated polypeptide encoding for an edge portion of T86235_P7 (SEQ ID NO:472), comprising an amino acid sequence being at least about 70%, optionally at least about 80%, preferably at least about 85%, more preferably at least about 90% and most preferably at least about 95% homologous to the sequence

(SEQ ID NO: 514)

GKELAGKECEHKRSSPHCELHTCPAPTPGNLMLPHLPPWPSLALPQEEGR
GCTSSPVLLIGLAVGGGGGEDSTWWKYRTPDLPLNFPCPS
of

(SEQ ID NO: 472)

T86235_P7.

[0106] In some embodiments, the isolated chimeric proteins or polypeptides of the invention may comprise an amino acid sequence corresponding to or homologous to that as set forth in T86235_P7 (SEQ ID NO:472), comprising a first amino acid sequence being at least about 90% homologous to amino acids 1-112 of Q6PJU7_HUMAN (SEQ ID NO: 439), which also corresponds to amino acids 1-112 of T86235_P7 (SEQ ID NO:472), and a second amino acid sequence being at least about 70%, optionally at least 80%, preferably at least 85%, more preferably at least 90% and most preferably at least 95% homologous to a polypeptide having the sequence EAPGTIEFVADPAALATILSGEGVKSCHLGRQPSLAKRVLVRGSQGGTTQRVQGVRASAYLAPRTPTHRLD PARASCFSRLEGPGPRGRTLCPQRLQALISPSGPSFHPSTRPSFQELRRETAGSSRTSVSQASGLLLETPVQPA FSLPKGEREVVTHSDEGGVASLGLAQRVPLRENREMSHTRDSHDSHLMPSPAPVAQPLPGHVVPCPSPFGR AQRVPSPGPPTLTSYSVLRRLTVQPKTRFTPMPSTPRVQQAQWLRGVSPQSCSEDPALPWEQVAVRLFDQE SCIRSLEGSGKPPVATPSGPHSNRTPSLQEVKIQRIGILQQLLRQEVEGLVGGQCVPLNGGSSLDMVELQPL LTEISRTLNATEHNSGTSHLPGLLKHSGLPKPCLPEECGEPQPCPPAEPGPPEAFCRSEPEIPEPSLQEQLEVP EPYPPAEPRPLESCCRSEPEIPESSRQEQLEVPEPCPPAEPRPLESYCRIEPEIPESSRQEQLEVPEPCPPAEPGP LQPSTQGQSGPPGPCPRVELGASEPCTLEHRSLESSLPPCCSQWAPATTSLIFSSQHPLCASPPICSLQSLRPP AGQAGKELAGKECEHKRSSPHCELHTCPAPTPGNLMLPHLPPWPSLALPQEEGRGCTSSPVLLIGLAVGGG GGEDSTWWKYRTPDLPLNFPCPSGLSNLAPRTLALRERLKSCLTAIHCFHEARLDDECAFYTSRAPPSGPT RVCTNPVATLLEWQDALCFIPVGSAAPQGSP (SEQ ID NO: 517) corresponding to amino acids 113-868 of T86235_P7 (SEQ ID NO:472), wherein said first amino acid sequence and second amino acid sequence are contiguous and in a sequential order.

[0107] In some embodiments, this invention provides an isolated polypeptide encoding for an edge portion of T86235_P7 (SEQ ID NO:472), comprising an amino acid sequence being at least about 70%, optionally at least about 80%, preferably at least about 85%, more preferably at least about 90% and most preferably at least about 95% homologous to the sequence

(SEQ ID NO: 517)

EAPGTIEFVADPAALATILSGEGVKSCHLGRQPSLAKRVLVRGSQGGTTQ
RVQGVRASAYLAPRTPTHRLDPARASCFSRLEGPGPRGRTLCPQRLQALI
SPSGPSFHPSTRPSFQELRRETAGSSRTSVSQASGLLLETPVQPAFSLPK
GEREVVTHSDEGGVASLGLAQRVPLRENREMSHTRDSHDSHLMPSPAPVA
QPLPGHVVPGPSPFGRAQRVPSPGPPTLTSYSVLRRLTVQPKTRFTPMPS
TPRVQQAQWLRGVSPQSCSEDPALPWEQVAVRLFDQESCIRSLEGSGKPP
VATPSGPHSNRTPSLQEVKIQRIGILQQLLRQEVEGLVGGQCVPLNGGSS
LDMVELQPLLTEISRTLNATEHNSGTSHLPGLLKHSGLPKPCLPEECGEP
QPCPPAEPGPPEAFCRSEPEIPEPSLQEQLEVPEPYPPAEPRPLESCCRS
EPEIPESSRQEQLEVPEPCPPAEPRPLESYCRIEPEIPESSRQEQLEVPE
PCPPAEPGPLQPSTQGQSGPPGPCPRVELGASEPCTLEHRSLESSLPPCC
SQWAPATTSLIFSSQHPLCASPPICSLQSLRPPAGQAGKELAGKECEHKR
SSPHCELHTCPAPTPGNLMLPHLPPWPSLALPQEEGRGCTSSPVLLIGLA
VGGGGGEDSTWWKYRTPDLPLNFPCPSGLSNLAPRTLALRERLKSCLTAI
HCFHEARLDDECAFYTSRAPPSGPTRVCTNPVATLLEWQDALCFIPVGSA
APQGSP
of

(SEQ ID NO: 506)

T86235_P7.

[0108] In some embodiments, the isolated chimeric proteins or polypeptides of the invention may comprise an amino acid sequence corresponding to or homologous to that as set forth in T86235_P11 (SEQ ID NO:473), comprising a first amino acid sequence being at least about 90% homologous to amino acids 1-223 of TAST_HUMAN (SEQ ID NO: 463), which also corresponds to amino acids 1-223 of T86235_P11 (SEQ ID NO:473), a bridging amino acid R corresponding to amino acid 224 of T86235_P11 (SEQ ID NO:473), a second amino acid sequence being at least about 90% homologous to amino acids 225-576 of TAST_HUMAN (SEQ ID NO: 463), which also corresponds to amino acids 225-576 of T86235_P11 (SEQ ID NO:473), a third amino acid sequence being at least about 90% homologous to amino acids 606-764 of TAST_HUMAN (SEQ ID NO: 463), which also corresponds to amino acids 577-735 of T86235_P11 (SEQ ID NO:473), and a fourth amino acid sequence being at least about 70%, optionally at least 80%, preferably at least 85%, more preferably at least 90% and most preferably at least 95% homologous to a polypeptide having the sequence VRLQPTAQLWLHSEPDGRWGTGTGGHLGFFTERSAGRLGYSARLAEL (SEQ ID NO: 518) corresponding to amino acids 736-782 of T86235_P11 (SEQ ID NO:473), wherein said first amino acid sequence, bridging amino acid, second amino acid sequence, third amino acid sequence and fourth amino acid sequence are contiguous and in a sequential order.

[0109] In some embodiments, the isolated chimeric proteins or polypeptides of the invention may comprise an amino acid sequence corresponding to or homologous to that as set forth in an edge portion of T86235_P11 (SEQ ID NO:473), comprising a polypeptide having a length “n”, wherein n is at least about 10 amino acids in length, optionally at least about 20 amino acids in length, preferably at least about 30 amino acids in length, more preferably at least about 40 amino acids in length and most preferably at least about 50 amino acids in length, wherein at least two amino acids comprise EE, having a structure as follows: a sequence starting from any of amino acid numbers 576−x to 576; and ending at any of amino acid numbers 577+((n−2)−x), in which x varies from 0 to n−2.

[0110] In some embodiments, this invention provides an isolated polypeptide encoding for an edge portion of T86235_P11 (SEQ ID NO:473), comprising an amino acid sequence being at least about 70%, optionally at least about 80%, preferably at least about 85%, more preferably at least about 90% and most preferably at least about 95% homologous to the sequence VRLQPTAQLWLHSEPDGRWGTGTGGHLGFFTERSAGRLGYSARLAEL (SEQ ID NO: 518) of T86235_P11 (SEQ ID NO:473).

[0111] In some embodiments, the isolated chimeric proteins or polypeptides of the invention may comprise an amino acid sequence corresponding to or homologous to that as set forth in T86235_P11 (SEQ ID NO:473), comprising a first amino acid sequence being at least about 90% homologous to amino acids 1-576 of Q8N5B2_HUMAN (SEQ ID NO: 467), which also corresponds to amino acids 1-576 of T86235_P11 (SEQ ID NO:473), a second amino acid sequence being at least about 90% homologous to amino acids 606-764 of Q8N5B2_HUMAN (SEQ ID NO: 467), which also corresponds to amino acids 577-735 of T86235_P11 (SEQ ID NO:473), and a third amino acid sequence being at least about 70%, optionally at least 80%, preferably at least 85%, more preferably at least 90% and most preferably at least 95% homologous to a polypeptide having the sequence VRLQPTAQLWLHSEPDGRWGTGTGGHLGFFTERSAGRLGYSARLAEL (SEQ ID NO: 518) corresponding to amino acids 736-782 of T86235_P11 (SEQ ID NO:473), wherein said first amino acid sequence, second amino acid sequence and third amino acid sequence are contiguous and in a sequential order.

[0112] In some embodiments, the isolated chimeric proteins or polypeptides of the invention may comprise an amino acid sequence corresponding to or homologous to that as set forth in an edge portion of T86235P11 (SEQ ID NO:473), comprising a polypeptide having a length “n”, wherein n is at least about 10 amino acids in length, optionally at least about 20 amino acids in length, preferably at least about 30 amino acids in length, more preferably at least about 40 amino acids in length and most preferably at least about 50 amino acids in length, wherein at least two amino acids comprise EE, having a structure as follows: a sequence starting from any of amino acid numbers 576−x to 576; and ending at any of amino acid numbers 577+((n−2)−x), in which x varies from 0 to n−2.

[0113] In some embodiments, this invention provides an isolated polypeptide encoding for an edge portion of T86235_P111 (SEQ ID NO:473), comprising an amino acid sequence being at least about 70%, optionally at least about 80%, preferably at least about 85%, more preferably at least about 90% and most preferably at least about 95% homologous to the sequence VRLQPTAQLWLHSEPDGRWGTGTGGHLGFFTERSAGRLGYSARLAEL (SEQ ID NO: 518) of T86235_P111 (SEQ ID NO:473).

[0114] In some embodiments, the isolated chimeric proteins or polypeptides of the invention may comprise an amino acid sequence corresponding to or homologous to that as set forth in T86235_P11 (SEQ ID NO:473), comprising a first amino acid sequence being at least about 90% homologous to amino acids 1-112 of Q6PJU7_HUMAN (SEQ ID NO: 439), which also corresponds to amino acids 1-112 of T86235_P11 (SEQ ID NO:473), and a second amino acid sequence being at least about 70%, optionally at least 80%, preferably at least 85%, more preferably at least 90% and most preferably at least 95% homologous to a polypeptide having the sequence EAPGTIEFVADPAALATILSGEGVKSCHLGRQPSLAKRVLVRGSQGGTTQRVQGVRASAYLAPRTPTHRLD PARASCFSRLEGPGPRGRTLCPQRLQALISPSGPSFHPSTRPSFQELRRETAGSSRTSVSQASGLLLETPVQPA FSLPKGEREVVTHSDEGGVASLGLAQRVPLRENREMSHTRDSHDSHLMPSPAPVAQPLPGHVVPCPSPFGR AQRVPSPGPPTLTSYSVLRRLTVQPKTRFTPMPSTPRVQQAQWLRGVSPQSCSEDPALPWEQVAVRLFDQE SCIRSLEGSGKPPVATPSGPHSNRTPSLQEVKIQRIGILQQLLRQEVEGLVGGQCVPLNGGSSLDMVELQPL LTEISRTLNATEHNSGTSHLPGLLKHSGLPKPCLPEECGEPQPCPPAEPGPPEAFCRSEPEIPEPSLQEQLEVP EPYPPAEPRPLESCCRSEPEIPESSRQEQLEEQLEVPEPCPPAEPGPLQPSTQGQSGPPGPCPRVELGASEPCT LEHRSLESSLPPCCSQWAPATTSLIFSSQHPLCASPPICSLQSLRPPAGQAGLSNLAPRTLALRERLKSCLTAI HCFHEARLDDECAFYTSRAPPSGPTRVCTNPVATLLEWQDALVRLQPTAQLWLHSEPDGRWGTGTOGHL GFFTERSAGRLGYSARLAEL (SEQ ID NO: 519) corresponding to amino acids 113-782 of T86235_P11 (SEQ ID NO:473), wherein said first amino acid sequence and second amino acid sequence are contiguous and in a sequential order.

[0115] In some embodiments, this invention provides an isolated polypeptide encoding for an edge portion of T86235_P11 (SEQ ID NO:473), comprising an amino acid sequence being at least about 70%, optionally at least about 80%, preferably at least about 85%, more preferably at least about 90% and most preferably at least about 95% homologous to the sequence

(SEQ ID NO: 519)

EAPGTIEFVADPAALATILSGEGVKSCHLGRQPSLAKRVLVRGSQGGTTQ
RVQGVRASAYLAPRTPTHRLDPARASCFSRLEGPGPRGRTLCPQRLQALI
SPSGPSFHPSTRPSFQELRRETAGSSRTSVSQASGLLLETPVQPAFSLPK
GEREVVTHSDEGGVASLGLAQRVPLRENREMSHTRDSHDSHLMPSPAPVA
QPLPGHVVPCPSPFGRAQRVPSPGPPTLTSYSVLRRLTVQPKTRFTPMPS
TPRVQQAQWLRGVSPQSCSEDPALPWEQVAVRLFDQESCIRSLEGSGKPP
VATPSGPHSNRTPSLQEVKAQRIGILQQLLRQEVEGLVGGQCVPLNGGSS
LDMVELQPLLTEISRTLNATEHNSGTSHLPGLLKHSGLPKPCLPEECGEP
QPCPPAEPGPPEAFCRSEPEIPEPSLQEQLEVPEPYPPAEPRPLESCCRS
EPEIPESSRQEQLEEQLEVPEPCPPAEPGPLQPSTQGQSGPPGPCPRVEL
GASEPCTLEHRSLESSLPPCCSQWAPATTSLIFSSQHPLCASPPICSLQS
LRPPAGQAGLSNLAPRTLALRERLKSCLTAIHCFHEARLDDECAFYTSRA
PPSGPTRVCTNPVATLLEWQDALVRIQPTAQLWLHSEPDGRWGTGTGGHL
GFFTERSAGRLGYSARLAEL
of

(SEQ ID NO: 473)

T86235_P11.

[0116] In some embodiments, such isolated chimeric proteins or polypeptides may comprise an amino acid sequence corresponding to or homologous to that set forth in T86235_P15 (SEQ ID NO:474).

[0117] In some embodiments, the isolated chimeric proteins or polypeptides of the invention may comprise an amino acid sequence corresponding to or homologous to that as set forth in T86235_P15 (SEQ ID NO:474), comprising a first amino acid sequence being at least about 90% homologous to amino acids 1-223 of TAST_HUMAN (SEQ ID NO: 463), which also corresponds to amino acids 1-223 of T86235_P15 (SEQ ID NO:474), a bridging amino acid R corresponding to amino acid 224 of T86235_P15 (SEQ ID NO:474), a second amino acid sequence being at least about 90% homologous to amino acids 225-576 of TAST_HUMAN (SEQ ID NO: 463), which also corresponds to amino acids 225-576 of T86235_P15 (SEQ ID NO:474), a third amino acid sequence being at least about 90% homologous to amino acids 606-699 of TAST_HUMAN (SEQ ID NO: 463), which also corresponds to amino acids 577-670 of T86235_P15 (SEQ ID NO:474), a fourth amino acid sequence being at least about 70%, optionally at least 80%, preferably at least 85%, more preferably at least 90% and most preferably at least 95% homologous to a polypeptide having the sequence GKELAGKECEHKRSSPHCELHTCPAPTPGNLMLPHLPPWPSLALPQEEGRGCTSSPVLLIGLAVGGGGGED STWWKYRTPDLPLNFPCPS (SEQ ID NO: 514) corresponding to amino acids 671-760 of T86235_P15 (SEQ ID NO:474), a fifth amino acid sequence being at least about 90% homologous to amino acids 700-764 of TAST_HUMAN (SEQ ID NO: 463), which also corresponds to amino acids 761-825 of T86235_P15 (SEQ ID NO:474), and a sixth amino acid sequence being at least about 70%, optionally at least 80%, preferably at least 85%, more preferably at least 90% and most preferably at least 95% homologous to a polypeptide having the sequence VRLQPTAQLWLHSEPDGRWGTGTGGHLGFFTERSAGRLGYSARLAEL (SEQ ID NO: 518) corresponding to amino acids 826-872 of T86235_P15 (SEQ ID NO:474), wherein said first amino acid sequence, bridging amino acid, second amino acid sequence, third amino acid sequence, fourth amino acid sequence, fifth amino acid sequence and sixth amino acid sequence are contiguous and in a sequential order.

[0118] In some embodiments, the isolated chimeric proteins or polypeptides of the invention may comprise an amino acid sequence corresponding to or homologous to that as set forth in an edge portion of T86235_P15 (SEQ ID NO:474), comprising a polypeptide having a length “n”, wherein n is at least about 10 amino acids in length, optionally at least about 20 amino acids in length, preferably at least about 30 amino acids in length, more preferably at least about 40 amino acids in length and most preferably at least about 50 amino acids in length, wherein at least two amino acids comprise EE, having a structure as follows: a sequence starting from any of amino acid numbers 576−x to 576; and ending at any of amino acid numbers 577+((n−2)−x), in which x varies from 0 to n−2.

[0119] In some embodiments, this invention provides an isolated polypeptide encoding for an edge portion of T86235_P1_{—}5 (SEQ ID NO:474), comprising an amino acid sequence being at least about 70%, optionally at least about 80%, preferably at least about 85%, more preferably at least about 90% and most preferably at least about 95% homologous to the sequence

(SEQ ID NO: 514)

GKELAGKECEHKRSSPHCELHTCPAPTPGNLMLPHLPPWPSLALPQEEGR
GCTSSPVLLIGLAVGGGGGEDSTWWKYRTPDLPLNFPCPS
of

(SEQ ID NO: 474)

T86235_P15.

[0120] In some embodiments, this invention provides an isolated polypeptide encoding for an edge portion of T86235_P15 (SEQ ID NO:474), comprising an amino acid sequence being at least about 70%, optionally at least about 80%, preferably at least about 85%, more preferably at least about 90% and most preferably at least about 95% homologous to the sequence VRLQPTAQLWLHSEPDGRWGTGTGGHLGFFTERSAGRLGYSARLAEL (SEQ ID NO: 518) of T86235_P15 (SEQ ID NO:474).

[0121] In some embodiments, the isolated chimeric proteins or polypeptides of the invention may comprise an amino acid sequence corresponding to or homologous to that as set forth in T86235_P15 (SEQ ID NO:474), comprising a first amino acid sequence being at least about 90% homologous to amino acids 1-576 of Q8N5B2_HUMAN (SEQ ID NO: 467), which also corresponds to amino acids 1-576 of T86235_P15 (SEQ ID NO:474), a second amino acid sequence being at least about 90% homologous to amino acids 606-699 of Q8N5B2_HUMAN (SEQ ID NO: 467), which also corresponds to amino acids 577-670 of T86235_P15 (SEQ ID NO:474), a third amino acid sequence being at least about 70%, optionally at least 80%, preferably at least 85%, more preferably at least 90% and most preferably at least 95% homologous to a polypeptide having the sequence GKELAGKECEHKRSSPHCELHTCPAPTPGNLMLPHLPPWPSLALPQEEGRGCTSSPVLLIGLAVGGGGGED STWWKYRTPDLPLNFPCPS (SEQ ID NO: 514) corresponding to amino acids 671-760 of T86235_P15 (SEQ ID NO:474), a fourth amino acid sequence being at least about 90% homologous to amino acids 700-764 of Q8N5B2_HUMAN (SEQ ID NO: 467), which also corresponds to amino acids 761-825 of T86235_P15 (SEQ ID NO:474), and a fifth amino acid sequence being at least about 70%, optionally at least 80%, preferably at least 85%, more preferably at least 90% and most preferably at least 95% homologous to a polypeptide having the sequence VRLQPTAQLWLHSEPDGRWGTGTGGHLGFFTERSAGRLGYSARLAEL (SEQ ID NO: 518) corresponding to amino acids 826-872 of T86235_P15 (SEQ ID NO:474), wherein said first amino acid sequence, second amino acid sequence, third amino acid sequence, fourth amino acid sequence and fifth amino acid sequence are contiguous and in a sequential order.

[0122] In some embodiments, the isolated chimeric proteins or polypeptides of the invention may comprise an amino acid sequence corresponding to or homologous to that as set forth in T86235_P15 (SEQ ID NO:474), comprising a first amino acid sequence being at least about 90% homologous to amino acids 1-112 of Q6PJU7_HUMAN (SEQ ID NO: 439), which also corresponds to amino acids 1-112 of T86235_P15 (SEQ ID NO:474), and a second amino acid sequence being at least about 70%, optionally at least 80%, preferably at least 85%, more preferably at least 90% and most preferably at least 95% homologous to a polypeptide having the sequence EAPGTIEFVADPAALATILSGEGVKSCHLGRQPSLAKRVLVRGSQGGTTQRVQGVRASAYLAPRTPTHRLD PARASCFSRLEGPGPRGRTLCPQRLQALISPSGPSFHPSTRPSFQELRRETAGSSRTSVSQASGLLLETPVQPA FSLPKGEREVVTHSDEGGVASLGLAQRVPLRENREMSHTRDSHDSHLMPSPAPVAQPLPGHVVPCPSPFGR AQRVPSPGPPTLTSYSVLRRLTVQPKTRFTPMPSTPRVQQAQWLRGVSPQSCSEDPALPWEQVAVRLFDQE SCIRSLEGSGKPPVATPSGPHSNRTPSLQEVKIQRIGILQQLLRQEVEGLVGGQCVPLNGGSSLDMVELQPL LTEISRTLNATEHNSGTSHLPGLLKHSGLPKPCLPEECGEPQPCPPAEPGPPEAFCRSEPEIPEPSLQEQLEVP EPYPPAEPRPLESCCRSEPEIPESSRQEQLEEQLEVPEPCPPAEPGPLQPSTQGQSGPPGPCPRVELGASEPCT LEHRSLESSLPPCCSQWAPATTSLIFSSQHPLCASPPICSLQSLRPPAGQAGKELAGKECEHKRSSPHCELHT CPAPTPGNLMLPHLPPWPSLALPQEEGRGCTSSPVLLIGLAVGGGGGEDSTWWKYRTPDLPLNFPCPSGLS NLAPRTLALRERLKSCLTAIHCFHEARLDDECAFYTSRAPPSGPTIRVCTNPVATLLEWQDALVRLQPTAQL WLHSEPDGRWGTGTGGHLGFFTERSAGRLGYSARLAEL (SEQ ID NO: 522) corresponding to amino acids 113-872 of T86235_P15 (SEQ ID NO:474), wherein said first amino acid sequence and second amino acid sequence are contiguous and in a sequential order.

[0123] In some embodiments, this invention provides an isolated polypeptide encoding for an edge portion of T86235_P15 (SEQ ID NO:474), comprising an amino acid sequence being at least about 70%, optionally at least about 80%, preferably at least about 85%, more preferably at least about 90% and most preferably at least about 95% homologous to the sequence

(SEQ ID NO: 522)

EAPGTIEFVADPAALATILSGEGVKSCTLGRQPSLAKRVLVRGSQGGTTQ
RVQGVRASAYLAPRTPTHRLDPARASCFSRLEGPGPRGRTLCPQRLQALI
SPSGPSFHPSTRPSFQELRRETAGSSRTSVSQASGLLLETPVQPAFSLPK
GEREVVTHSDEGGVASLGLAQRVPLRENREMSHTRDSHDSHLMPSPAPVA
QPLPGHVVPCPSPFGRAQRVPSPGPPTLTSYSVLRRLTVQPKTRFTPMPS
TPRVQQAQWLRGVSPQSCSEDPALPWEQVAVRLFDQESCIRSLEGSGKPP
VATPSGPHSNRTPSLQEVKIQRIGILQQLLRQEVEGLVGGQGVPLNGGSS
LDMVELQPLLTEISRTLNATEHNSGTSHLPGLLKHSGLPKPCLPEECGEP
QPCPPAEPGPPEAFCRSEPEIPEPSLQEQLEVPEPYPPAEPRPLESCCRS
EPEIPESSRQEQLEEQLEVPEPCPPAEPGPLQPSTQGQSGPPGPCPRVEL
GASEPCTLEHRSLESSLPPCCSQWAPATTSLIFSSQHPLCASPPICSLQS
LRPPAGQAGKELAGKECEHKRSSPHCELHTCPAPTPGNLMLPHLPPWPSL
ALPQEEGRGCTSSPVLLIGLAVGGGGGEDSTWWKYRTPDLPLNFPCPSGL
SNLAPRTLALRERLKSCLTAIHCFHEARLDDECAFYTSRAPPSGPTRVCT
NPVATLLEWQDALVRLQPTAQLWLHSEPDGRWGTGTGGHLGFFTERSAGR
LGYSARLAEL
of

(SEQ ID NO: 474)

T86235_P15.

[0124] In some embodiments, such isolated chimeric proteins or polypeptides may comprise an amino acid sequence corresponding to or homologous to that set forth in T86235_P21 (SEQ ID NO:475).

[0125] In some embodiments, the isolated chimeric proteins or polypeptides of the invention may comprise an amino acid sequence corresponding to or homologous to that as set forth in T86235_P21 (SEQ ID NO:475), comprising a first amino acid sequence being at least about 70%, optionally at least 80%, preferably at least 85%, more preferably at least 90% and most preferably at least 95%, homologous to a polypeptide having the sequence KKKKKISQIQLNESLAHLVPQSSYARGPIPLSLPPSFSFSSFLA (SEQ ID NO: 523) corresponding to amino acids 1-44 of T86235_P21 (SEQ ID NO:475), a second amino acid sequence being at least about 90% homologous to amino acids 113-223 of TAST_HUMAN (SEQ ID NO: 463), which also corresponds to amino acids 45-155 of T86235_P21 (SEQ ID NO:475), a bridging amino acid R corresponding to amino acid 156 of T86235_P21 (SEQ ID NO:475), a third amino acid sequence being at least about 90% homologous to amino acids 225-576 of TAST_HUMAN (SEQ ID NO: 463), which also corresponds to amino acids 157-508 of T86235_P21 (SEQ ID NO:475), and a fourth amino acid sequence being at least about 90% homologous to amino acids 606-778 of TAST_HUMAN (SEQ ID NO: 463), which also corresponds to amino acids 509-681 of T86235_P21 (SEQ ID NO:475), wherein said first amino acid sequence, second amino acid sequence, bridging amino acid, third amino acid sequence and fourth amino acid sequence are contiguous and in a sequential order.

[0126] In some embodiments, this invention provides an isolated polypeptide encoding for a head of T86235_P21 (SEQ ID NO:475), comprising a polypeptide being at least 70%, optionally at least about 80%, preferably at least about 85%, more preferably at least about 90% and most preferably at least about 95% homologous to the sequence KKKKKISQIQLNESLAHLVPQSSYARGPIPLSLPPSFSFSSFLA (SEQ ID NO: 523) of T86235_P21 (SEQ ID NO:475).

[0127] In some embodiments, the isolated chimeric proteins or polypeptides of the invention may comprise an amino acid sequence corresponding to or homologous to that as set forth in an edge portion of T86235_P21 (SEQ ID NO:475), comprising a polypeptide having a length “n”, wherein n is at least about 10 amino acids in length, optionally at least about 20 amino acids in length, preferably at least about 30 amino acids in length, more preferably at least about 40 amino acids in length and most preferably at least about 50 amino acids in length, wherein at least two amino acids comprise EE, having a structure as follows: a sequence starting from any of amino acid numbers 508−x to 508; and ending at any of amino acid numbers 509+((n−2)−x), in which x varies from 0 to n−2.

[0128] In some embodiments, the isolated chimeric proteins or polypeptides of the invention may comprise an amino acid sequence corresponding to or homologous to that as set forth in T86235_P21 (SEQ ID NO:475), comprising a first amino acid sequence being at least about 70%, optionally at least 80%, preferably at least 85%, more preferably at least 90% and most preferably at least 95%, homologous to a polypeptide having the sequence KKKKKISQIQLNESLAHLVPQSSYARGPIPLSLPPSFSFSSFLA (SEQ ID NO: 523) corresponding to amino acids 1-44 of T86235_P21 (SEQ ID NO:475), a second amino acid sequence being at least about 90% homologous to amino acids 113-576 of Q8N5B2_HUMAN (SEQ ID NO: 467), which also corresponds to amino acids 45-508 of T86235_P21 (SEQ ID NO:475), and a third amino acid sequence being at least about 90% homologous to amino acids 606-778 of Q8N5B2_HUMAN (SEQ ID NO: 467), which also corresponds to amino acids 509-681 of T86235_P21 (SEQ ID NO:475), wherein said first amino acid sequence, second amino acid sequence and third amino acid sequence are contiguous and in a sequential order.

[0129] In some embodiments, the isolated chimeric proteins or polypeptides of the invention may comprise an amino acid sequence corresponding to or homologous to that as set forth in T86235_P26 (SEQ ID NO:476), comprising a first amino acid sequence being at least about 90% homologous to amino acids 465-576 of TAST_HUMAN (SEQ ID NO: 463), which also corresponds to amino acids 1-112 of T86235_P26 (SEQ ID NO:476), and a second amino acid sequence being at least about 90% homologous to amino acids 606-778 of TAST_HUMAN (SEQ ID NO: 463), which also corresponds to amino acids 113-285 of T86235_P26 (SEQ ID NO:476), wherein said, first amino acid sequence and second amino acid sequence are contiguous and in a sequential order.

[0130] In some embodiments, the isolated chimeric proteins or polypeptides of the invention may comprise an amino acid sequence corresponding to or homologous to that as set forth in an edge portion of T86235_P26 (SEQ ID NO:476), comprising a polypeptide having a length “n”, wherein n is at least about 10 amino acids in length, optionally at least about 20 amino acids in length, preferably at least about 30 amino acids in length, more preferably at least about 40 amino acids in length and most preferably at least about 50 amino acids in length, wherein at least two amino acids comprise EE, having a structure as follows: a sequence starting from any of amino acid numbers 112−x to 112; and ending at any of amino acid numbers 113+((n−2)−x), in which x varies from 0 to n−2.

[0131] In some embodiments, the isolated chimeric proteins or polypeptides of the invention may comprise an amino acid sequence corresponding to or homologous to that as set forth in T86235_P26 (SEQ ID NO:476), comprising a first amino acid sequence being at least about 90% homologous to amino acids 465-576 of Q8N5B2_HUMAN (SEQ ID NO: 467), which also corresponds to amino acids 1-112 of T86235_P26 (SEQ ID NO:476), and a second amino acid sequence being at least about 90% homologous to amino acids 606-778 of Q8N5B2_HUMAN (SEQ ID NO: 467), which also corresponds to amino acids 113-285 of T86235_P26 (SEQ ID NO:476), wherein said, first amino acid sequence and second amino acid sequence are contiguous and in a sequential order.

[0132] In some embodiments, the term “polypeptide” is to be understood to refer to a molecule comprising from at least 2 to several thousand or more amino acids. The term “polypeptide” is to be understood to include, inter alia, native peptides (either degradation products, synthetically synthesized peptides or recombinant peptides), peptidomimetics, such as peptoids and semipeptoids or peptide analogs, which may comprise, for example, any desirable modification, including, inter alia, modifications rendering the peptides more stable while in a body or more capable of penetrating into cells, or others as will be appreciated by one skilled in the art. Such modifications include, but are not limited to N terminus modification, C terminus modification, peptide bond modification, backbone modifications, residue modification, or others. Inclusion of such peptides within the polypeptides of this invention may produce a polypeptide sharing identity with the polypeptides described herein, for example, those provided in the sequence listing.

[0133] Methods for preparing, isolating, deriving, etc., the polypeptides of this invention are well known in the art. In some embodiments, the polypeptides of this invention comprise variants of known proteins. For example, and in some embodiments, the polypeptides of this invention comprise splice variants of native proteins expressed in a given subject. In some embodiments, the polypeptides may be obtained through known protein evolution techniques available in the art. In some embodiments, the polypeptides of this invention may be obtained via rational design, based on a particular native polypeptide sequence.

[0134] In some embodiments, this invention provides for antibodies or antibody fragments specifically interacting with or recognizing a polypeptide of this invention.

[0135] In one embodiment, the antibody recognizes one or more epitopes (antigen determinants) contained within the polypeptides of this invention. In some embodiments, reference to the antibody property of “specific interaction” or “recognition” is to be understood as including covalent and/or non-covalent associations, and with a variance of affinity over several orders of magnitude. Such terms are to be understood as relative, with respect to an index molecule, for which the antibody is though to have little to no specific interaction or recognition.

[0136] In one embodiment, the antibodies will specifically interact or recognize a particular antigen determinant. In some embodiments, the antibodies or antibody fragments of this invention will recognize or interact with a polypeptide or protein of the invention, and will not substantially recognize or interact with other molecules, even when present in the same sample, such as a biological sample. In some embodiments, the antibodies of this invention have a specificity such that the specific interaction with or binding to the antigen is at least about 2, or in some embodiments, at least about 5, or in some embodiments, at least about 10-fold greater than interaction or binding observed under the same reaction conditions with a molecule that does not include the antigenic determinant.

[0137] The antibodies may be useful, in some embodiments, in detecting qualitative and/or quantitative changes in expression of the polypeptides or polynucleotides of this invention. In some embodiments, changes in expression are associated with a particular disease or disorder, such that detection of such changes comprises a diagnostic method of this invention.

[0138] In one embodiment, this invention provides a diagnostic kit for detecting a disease, comprising reagents which detect qualitative and/or quantitative changes in expression of a polypeptide or polynucleotide of this invention.

[0139] Optionally, the kit comprises a NAT-based technology; optionally and preferably, the kit further comprises at least one nucleotide probe or primer, alternatively and optionally this kit comprises at least one primer pair capable of selectively hybridizing to a nucleic acid sequence as described herein; alternatively and optionally, said kit further comprises at least one oligonucleotide capable of selectively hybridizing to a nucleic acid sequence according to any of the above claims.

[0140] Alternatively and optionally, the kit comprises an antibody according to any of the above claims, optionally and preferably, the kit further comprises at least one reagent for performing an ELISA or a Western blot.

[0141] In some embodiments, this invention provides a diagnostic method, for example, a method of detection of a polypeptide or polynucleotide of this invention, whereby expression, or relative changes in expression of the polypeptide or polynucleotide herald the onset, severity, or prognosis of an individual with regard to a particular disease, disorder or condition.

[0142] In some embodiments, such detection may comprise detection of specific expression of a splice variant, or other polypeptide or polynucleotide of this invention, via any means known in the art, and as described herein.

[0143] In some embodiments, detection of the following genes and/or any expressed transcripts, and/or proteins, preferably including any splice variants, forms part of the diagnostic methods of this invention: AA383349, H61775, AA583399, H13410, T86235HUMPAX8A, N31842, T58132, or any combination thereof.

[0144] In some embodiments, detection of AA383349_T6 (SEQ ID NO: 334), AA383349_T7 (SEQ ID NO: 1), AA383349_T16 (SEQ ID NO: 2), AA383349_T17 (SEQ ID NO: 3), AA383349_P4 (SEQ ID NO: 33), AA383349_P5 (SEQ ID NO: 34), AA383349_P11 (SEQ ID NO: 35), AA383349_P12 (SEQ ID NO: 36), H61775_T22 (SEQ ID NO:345), H61775T23 (SEQ ID NO:346), H61775_P17 (SEQ ID NO:354), H61775_P18 (SEQ ID NO:355), H13410_T8 (SEQ ID NO: 87), H13410_T12 (SEQ ID NO: 88), H13410_T18 (SEQ ID NO: 89), H13410_T21 (SEQ ID NO: 90), H13410_T27 (SEQ ID NO: 91), H13410_T35 (SEQ ID NO: 92), H13410_P4 (SEQ ID NO: 139), H13410_P8 (SEQ ID NO: 140), H13410_P9 (SEQ ID NO: 141), H13410_P20 (SEQ ID NO: 142), H13410_P46 (SEQ ID NO: 143), H13410_P47 (SEQ ID NO: 144), and known H13410 amino acid (SEQ ID NOs:133-138) and/or nucleic acid sequences (SEQ ID NOs:420, 491), T86235_T5 (SEQ ID NO:440), T86235_T6 (SEQ ID NO:441), T86235_T7 (SEQ ID NO:442), T86235_T11 (SEQ ID NO:443), T86235_T13 (SEQ ID NO:444), T86235_T15 (SEQ ID NO:445), T86235_T18 (SEQ ID NO:446), T86235_T26 (SEQ ID NO:447), T86235_T32 (SEQ ID NO:448), T86235_T36 (SEQ ID NO:449), T86235_P4 (SEQ ID NO:469), T86235_P5 (SEQ ID NO:470), T86235_P6 (SEQ ID NO:471), T86235_P7 (SEQ ID NO:472), T86235_P1 (SEQ ID NO:473), T86235_P15 (SEQ ID NO:474), T86235_P21 (SEQ ID NO:475), T86235_P26 (SEQ ID NO:476), T86235_P30 (SEQ ID NO:477) and WT, N31842_T4 (SEQ ID NO:478), N31842_T5 (SEQ ID NO:479), N31842_T6 (SEQ ID NO:480), N31842_P3 (SEQ ID NO:488), N31842_P4 (SEQ ID NO:489), N31842_P5 (SEQ ID NO:490), or relative changes in expression and/or level of these variants is indicative of the presence, onset, severity or prognosis, and/or staging, and/or progression of breast cancer in a subject. In some embodiments, the polypeptides, polynucleotides and/or methods of this invention may be useful in the treatment selection and monitoring, diagnosis or prognosis assessment of breast cancer.

[0145] In some embodiments, detection of AA583399_T0 (SEQ ID NO: 37), AA583399_T1 (SEQ ID NO: 38), AA583399_T2 (SEQ ID NO: 39), AA583399_T3 (SEQ ID NO: 40), AA583399_T4 (SEQ ID NO: 41), AA583399_T5 (SEQ ID NO: 42), AA583399_T6 (SEQ ID NO: 43), AA583399_T7 (SEQ ID NO: 44), AA583399_T8 (SEQ ID NO: 45), AA583399_T9 (SEQ ID NO: 46), AA583399_T10 (SEQ ID NO: 47), AA583399_T11 (SEQ ID NO: 48), AA583399_T12 (SEQ ID NO: 49), AA583399_T15 (SEQ ID NO: 50), AA583399_T16 (SEQ ID NO: 51), AA583399_T17 (SEQ ID NO: 52), AA583399_P3 (SEQ ID NO: 77), AA583399_P2 (SEQ ID NO: 78), AA583399_P4 (SEQ ID NO: 79), AA583399_P5 (SEQ ID NO: 80), AA583399_P6 (SEQ ID NO: 81), AA583399_P8 (SEQ ID NO: 82), AA583399_P10 (SEQ ID NO: 83), AA583399_P11 (SEQ ID NO: 84), AA583399_P12 (SEQ ID NO: 85), AA583399_P14 (SEQ ID NO: 86), and known AA583399 amino acid (SEQ ID NOs:73-76) and/or nucleic acid sequences (SEQ ID NO:433), H13410_T8 (SEQ ID NO: 87), H13410_T12 (SEQ ID NO: 88), H13410_T18 (SEQ ID NO: 89), H13410_T21 (SEQ ID NO: 90), H13410_T27 (SEQ ID NO: 91), H13410_T35 (SEQ ID NO: 92), H13410_P4 (SEQ ID NO: 139), H13410_P8 (SEQ ID NO: 140), H13410_P9 (SEQ ID NO: 141), H13410_P20 (SEQ ID NO: 142), H13410_P46 (SEQ ID NO: 143), H13410_P47 (SEQ ID NO: 144), and known H13410 amino acid (SEQ ID NOs:133-138) and/or nucleic acid sequences (SEQ ID NOs:420, 491), T86235_T5 (SEQ ID NO:440), T86235_T6 (SEQ ID NO:441), T86235_T7 (SEQ ID NO:442), T86235T111 (SEQ ID NO:443), T86235_T13 (SEQ ID NO:444), T86235_T15 (SEQ ID NO:445), T86235_T18 (SEQ ID NO:446), T86235_T26 (SEQ ID NO:447), T86235_T32 (SEQ ID NO:448), T86235_T36 (SEQ ID NO:449), T86235_P4 (SEQ ID NO:469), T86235_P5 (SEQ ID NO:470), T86235_P6 (SEQ ID NO:471), T86235_P7 (SEQ ID NO:472), T86235_P11 (SEQ ID NO:473), T86235_P15 (SEQ ID NO:474), T86235_P21 (SEQ ID NO:475), T86235_P26 (SEQ ID NO:476), T86235_P30 (SEQ ID NO:477), and WT, H61775_P18 (SEQ ID NO:355), HUMPAX8A_T21 (SEQ ID NO: 421), HUMPAX8A_T24 (SEQ ID NO: 156), HUMPAX8A_T26 (SEQ ID NO: 157), HUMPAX8A_T30 (SEQ ID NO: 158), HUMPAX8A_P33 (SEQ ID NO: 183), HUMPAX8A_P36 (SEQ ID NO: 184), HUMPAX8A_P37 (SEQ ID NO: 185), HUMPAX8A_P40 (SEQ ID NO: 186), N31842_T4 (SEQ ID NO:478), N31842_T5 (SEQ ID NO:479), N31842_T6 (SEQ ID NO:480), N31842_P3 (SEQ ID NO:488), N31842_P4 (SEQ ID NO:489), N31842_P5 (SEQ ID NO:490), T58132_T2 (SEQ ID NO: 187), T58132_T4 (SEQ ID NO: 188), T58132_T7 (SEQ ID NO: 189), T58132_T9 (SEQ ID NO: 190), T58132_T10 (SEQ ID NO: 191), T58132_T11 (SEQ ID NO: 192), T58132_T12 (SEQ ID NO: 193), T58132_P0 (SEQ ID NO: 213), T58132_P1 (SEQ ID NO: 214), T58132_P2 (SEQ ID NO: 215), T58132_P12 (SEQ ID NO: 216), T58132_P13 (SEQ ID NO: 217), or relative changes in expression and/or level of these variants, their products or certain variants thereof is indicative of the presence, onset, severity or prognosis, and/or staging, and/or progression of ovarian cancer in a subject. In some embodiments, the polypeptides, polynucleotides and/or methods of this invention may be useful in the treatment selection and monitoring, diagnosis or prognosis assessment of ovarian cancer.

[0146] In some embodiments, detection of T58132_T2 (SEQ ID NO: 187), T58132_T4 (SEQ ID NO: 188), T58132_T7 (SEQ ID NO: 189), T58132_T9 (SEQ ID NO: 190), T58132_T10 (SEQ ID NO: 191), T58132_T11 (SEQ ID NO: 192), T58132_T12 (SEQ ID NO: 193), T58132_P0 (SEQ ID NO: 213), T58132_P1 (SEQ ID NO: 214), T58132_P2 (SEQ ID NO: 215), T58132_P12 (SEQ ID NO: 216), T58132_P13 (SEQ ID NO: 217), or relative changes in expression and/or level of these variants, their products or certain variants thereof is indicative of the presence, onset, severity or prognosis, and/or staging, and/or progression of colon cancer in a subject. In some embodiments, the polypeptides, polynucleotides and/or methods of this invention may be useful in the treatment selection and monitoring, diagnosis or prognosis assessment of colon cancer.

[0147] In some embodiments, detection of AA583399_T0 (SEQ ID NO: 37), AA583399_T1 (SEQ ID NO: 38), AA583399_T2 (SEQ ID NO: 39), AA583399_T3 (SEQ ID NO: 40), AA583399_T4 (SEQ ID NO: 41), AA583399_T5 (SEQ ID NO: 42), AA583399_T6 (SEQ ID NO: 43), AA583399_T7 (SEQ ID NO: 44), AA583399_T8 (SEQ ID NO: 45), AA583399_T9 (SEQ ID NO: 46), AA583399T10 (SEQ ID NO: 47), AA583399_T11 (SEQ ID NO: 48), AA583399_T12 (SEQ ID NO: 49), AA583399_T15 (SEQ ID NO: 50), AA583399_T16 (SEQ ID NO: 51), AA583399_T17 (SEQ ID NO: 52), AA583399_P3 (SEQ ID NO: 77), AA583399_P2 (SEQ ID NO: 78), AA583399_P4 (SEQ ID NO: 79), AA583399_P5 (SEQ ID NO: 80), AA583399_P6 (SEQ ID NO: 81), AA583399_P8 (SEQ ID NO: 82), AA583399_P10 (SEQ ID NO: 83), AA583399_P11 (SEQ ID NO: 84), AA583399_P12 (SEQ ID NO: 85), AA583399_P14 (SEQ ID NO: 86), and known AA583399 amino acid (SEQ ID NOs:73-76) and/or nucleic acid sequences (SEQ ID NO:433), H13410_T8 (SEQ ID NO: 87), H13410_T12 (SEQ ID NO: 88), H13410_T18 (SEQ ID NO: 89), H13410_T21 (SEQ ID NO: 90), H13410_T27 (SEQ ID NO: 91), H13410_T35 (SEQ ID NO: 92), H13410_P4 (SEQ ID NO: 139), H13410_P8 (SEQ ID NO: 140), H13410_P9 (SEQ ID NO: 141), H13410_P20 (SEQ ID NO: 142), H13410_P46 (SEQ ID NO: 143), H13410_P47 (SEQ ID NO: 144), and known H13410 amino acid (SEQ ID NOs:133-138) and/or nucleic acid sequences (SEQ ID NOs:420, 491), T86235_T5 (SEQ ID NO:440), T86235_T6 (SEQ ID NO:441), T86235_T7 (SEQ ID NO:442), T86235_T11 (SEQ ID NO:443), T86235_T13 (SEQ ID NO:444), T86235_T15 (SEQ ID NO:445), T86235_T18 (SEQ ID NO:446), T86235_T26 (SEQ ID NO:447), T86235_T32 (SEQ ID NO:448), T86235_T36 (SEQ ID NO:449), T86235_P4 (SEQ ID NO:469), T86235_P5 (SEQ ID NO:470), T86235_P6 (SEQ ID NO:471), T86235_P7 (SEQ ID NO:472), T86235_P11 (SEQ ID NO:473), T86235_P15 (SEQ ID NO:474), T86235_P21 (SEQ ID NO:475), T86235_P26 (SEQ ID NO:476), and known T86235 amino acid (SEQ ID NOs:437, 438, 462-468) and/or nucleic acid sequences (SEQ ID NOs:436, 438), H61775_P18 (SEQ ID NO:355), N31842_P3 (SEQ ID NO:488), T58132_T2 (SEQ ID NO: 187), T58132_T4 (SEQ ID NO: 188), T58132_T7 (SEQ ID NO: 189), T58132_T9 (SEQ ID NO: 190), T58132_T10 (SEQ ID NO: 191), T58132_T11 (SEQ ID NO: 192), T58132_T12 (SEQ ID NO: 193), T58132_P0 (SEQ ID NO: 213), T58132_P1 (SEQ ID NO: 214), T58132_P2 (SEQ ID NO: 215), T58132_P12 (SEQ ID NO: 216), T58132_P13 (SEQ ID NO: 217), or relative changes in expression and/or level of these variants, their products or certain variants thereof is indicative of the presence, onset, severity or prognosis, and/or staging, and/or progression of lung cancer in a subject. In some embodiments, the polypeptides, polynucleotides and/or methods of this invention may be useful in the treatment selection and monitoring, diagnosis or prognosis assessment of lung cancer. In some embodiments, detection of N31842_T4 (SEQ ID NO:478), N31842_T5 (SEQ ID NO:479), N31842_T6 (SEQ ID NO:480), N31842_P3 (SEQ ID NO:488), N31842_P4 (SEQ ID NO:489), N31842_P5 (SEQ ID NO:490), or relative changes in expression of these variants, their products or certain variants thereof is indicative of the presence, onset, severity or prognosis and/or staging and or progression of renal disease and/or condition including but not limited to any type of renal damage; renal cancer, including but not limited to renal cell carcinoma; polycystic kidney disease; Diabetes induced nephropathy; Chronic Kidney Disease; Total Kidney Failure; Autoimmune nephropathy, including but not limited to Systemic lupus erythematosus (SLE), Goodpasture's syndrome, IgA nephropathy; Hereditary Nephritis—(Alport Syndrome); Infection-related Glomerular Disease, including but not limited to Acute post-streptococcal glomerulonephritis (PSGN), Bacterial endocarditis, HIV; Glomerulosclerosis; Focal segmental glomenilosclerosis (FSGS); Membranous nephropathy; Minimal change disease (MCD) in a subject. In some embodiments, the polypeptides, polynucleotides and/or methods of this invention may be useful in the treatment selection and monitoring, diagnosis or prognosis assessment of any type of renal disease.

[0148] The polypeptides and/or polynucleotides of this invention may serve as markers or indicators of disease initiation, severity and/or response to treatment, for the indicated disease, disorder or condition, and their use as such is to be considered part of this invention, and part of the methods of this invention.

[0149] In some embodiments, the phrase “marker-detectable disease is a particular cluster marker detectable disease” refers to the fact that any polynucleotides and/or polypeptides of this invention can be used to detect the indicated disease, or assess the parameters of the disease, etc., as described herein. In some embodiments, a particular cluster will be useful for the diagnosis, assessment and prognostic indications regarding the indicated disease disorder or condition.

[0150] In one embodiment, the marker-detectable disease is cluster AA383349, or cluster H61775 marker-detectable disease and is a cancer, including but not limited to breast cancer, breast cancer invasion and metastasis.

[0151] In another embodiment, the marker-detectable disease is a cluster AA583399 marker-detectable disease and is a cancer, including but not limited to ovary cancer, lung cancer, ovary and lung cancer invasion and metastasis.

[0152] In another embodiment, the marker-detectable disease is cluster H13410, cluster T86235 or H61775_P18 (SEQ ID NO:355) marker-detectable disease and is a cancer, including but not limited to ovary cancer, lung cancer, breast cancer, ovary, lung and breast cancer invasion and metastasis.

[0153] In another embodiment, the marker-detectable disease is a cluster HUMPAX8A marker-detectable disease and is a cancer, including but not limited to ovary cancer, ovary cancer invasion and metastasis.

[0154] In another embodiment, the marker-detectable disease is a cluster N31842 marker-detectable disease and is a cancer, including but not limited to ovary cancer, lung cancer, breast cancer, ovary, lung and breast cancer invasion and metastasis.

[0155] In another embodiment, the marker-detectable disease is a cluster T58132 marker-detectable disease and is a cancer, including but not limited to colon cancer, ovary cancer, lung cancer, colon, ovary and lung cancer invasion and metastasis.

[0156] In another embodiment, the marker-detectable disease is a cluster N31842 marker-detectable disease and is a renal disease and/or condition including but not limited to any type of renal damage; renal cancer, including but not limited to renal cell carcinoma; polycystic kidney disease; Diabetes induced nephropathy; Chronic Kidney Disease; Total Kidney Failure; Autoimmune nephropathy, including but not limited to Systemic lupus erythematosus (SLE), Goodpasture's syndrome, IgA nephropathy; Hereditary Nephritis—(Alport Syndrome); Infection-related Glomerular Disease, including but not limited to Acute post-streptococcal glomerulonephritis (PSGN), Bacterial endocarditis, HIV; Glomerulosclerosis; Focal segmental glomerulosclerosis (FSGS); Membranous nephropathy; Minimal change disease (MCD). In another embodiment, the marker-detectable disease is a cluster T58132 marker-detectable disease and is a cancer, including but not limited ovary cancer, lung cancer, colon cancer, ovary, colon and lung cancer invasion and metastasis.

[0157] In another embodiment, the following clusters: H13410, HUMPAX8A, N31842, T58132, showing age and/or stage differential diagnostic capability, the present invention provides diagnostic methods, kits and assays for diagnosis, assessment and prognostic indications regarding the indicated disease disorder or condition, according to the age of the subject and/or stage of the condition, as described herein.

[0158] With regard to lung cancer, the disease (and/or diagnostic method to be performed) comprises, in some embodiments, one or more of invasive or metastatic lung cancer; squamous cell lung carcinoma, lung adenocarcinoma, carcinoid, small cell lung cancer or non-small cell lung cancer; detection of overexpression in lung metastasis (vs. primary tumor); detection of overexpression in lung cancer, for example non small cell lung cancer, for example adenocarcinoma, squamous cell cancer or carcinoid, or large cell carcinoma; identification of a metastasis of unknown origin which originated from a primary lung cancer; assessment of a malignant tissue residing in the lung that is from a non-lung origin, including but not limited to: osteogenic and soft tissue sarcomas; colorectal, uterine, cervix and corpus tumors; head and neck, breast, testis and salivary gland cancers; melanoma; and bladder and kidney tumors; distinguishing between different types of lung cancer, therefore potentially affect treatment choice (e.g. small cell vs. non small cell tumors); analysis of unexplained dyspnea and/or chronic cough and/or hemoptysis; differential diagnosis of the origin of a pleural effusion; diagnosis of conditions which have similar symptoms, signs and complications as lung cancer and where the differential diagnosis between them and lung cancer is of clinical importance including but not limited to: non-malignant causes of lung symptoms and signs, including but not limited to: lung lesions and infiltrates, wheeze, stridor, tracheal obstruction, esophageal compression, dysphagia, recurrent laryngeal nerve paralysis, hoarseness, phrenic nerve paralysis with elevation of the hemidiaphragm and Horner syndrome; or detecting a cause of any condition suggestive of a malignant tumor including but not limited to anorexia, cachexia, weight loss, fever, hypercalcemia, hypophosphatemia, hyponatremia, syndrome of inappropriate secretion of antidiuretic hormone, elevated ANP, elevated ACTH, hypokalemia, clubbing, neurologic-myopathic syndromes and thrombophlebitis.

[0159] In some embodiments, the polypeptides and/or polynucleotides of this invention may be useful as potential markers for lung cancer, alone or in combination with one or more alternative polynucleotides or polypeptides described herein, and/or in combination with known markers for lung cancer, including but not limited to CEA, CA15-3, Beta-2-microglobulin, CA19-9, TPA, and/or in combination with the known protein(s) for the variant marker as described herein.

[0160] With regard to breast cancer, for the detection of the disease (and/or for the diagnostic method to be performed) the polypeptides and/or polynucleotides may be useful in determining a probable outcome in breast cancer; identification of a metastasis of unknown origin which originated from a primary breast cancer tumor; assessing lymphadenopathy, and in particular axillary lymphadenopathy; distinguishing between different types of breast cancer, therefore potentially affect treatment choice (e.g. as HER-2); differentially diagnosing between a benign and malignant breast mass; as a tool in the assessment of conditions affecting breast skin (e.g. Paget's disease) and their differentiation from breast cancer; differential diagnosis of breast pain or discomfort resulting from either breast cancer or other possible conditions (e.g. mastitis, Mondors syndrome); non-breast cancer conditions which have similar symptoms, signs and complications as breast cancer and where the differential diagnosis between them and breast cancer is of clinical importance including but not limited to: abnormal mammogram and/or nipple retraction and/or nipple discharge due to causes other than breast cancer, including but not limited to benign breast masses, melanoma, trauma and technical and/or anatomical variations; determining a cause of any condition suggestive of a malignant tumor including but not limited to anorexia, cachexia, weight loss, fever, hypercalcemia, paraneoplastic syndrome; or determining a cause of lymphadenopathy, weight loss and other signs and symptoms associated with breast cancer but originate from diseases different from breast cancer including but not limited to other malignancies, infections and autoimmune diseases.

[0161] Each variant marker of the present invention described herein as potential marker for breast cancer, might optionally be used alone or in combination with one or more other variant breast cancer described herein, and/or in combination with known markers for breast cancer, including but not limited to Calcitonin, CA15-3 (Mucin1), CA27-29, TPA, a combination of CA 15-3 and CEA, CA 27.29 (monoclonal antibody directed against MUC1), Estrogen 2 (beta), HER-2 (c-erbB2), and/or in combination with the known protein(s) for the variant marker as described herein.

[0162] It is to be understood that any polynucleotide or polypeptide of this invention may be useful as a marker for a disease, disorder or condition, and such use is to be considered a part of this invention.

[0163] With regard to colon cancer, the disease (and/or diagnostic method to be performed) optionally and preferably comprises one or more of invasive or metastatic colon cancer.

[0164] Each marker of the present invention described herein as potential marker for colorectal cancer, might optionally be used alone or in combination with one or more other variant colorectal cancer described herein, and/or in combination with known markers for colorectal cancer, including but not limited to CEA, CA19-9, CA50, and/or in combination with the known protein(s) for the variant marker as described herein.

[0165] With regard to ovarian cancer, the polypeptides and/or polynucleotide may be used in the diagnosis, treatment or prognostic assessment of invasive or metastatic ovarian cancer; correlating stage and malignant potential; identification of a metastasis of unknown origin which originated from a primary ovarian cancer; differential diagnosis between benign and malignant ovarian cysts; diagnosing a cause of infertility, for example differential diagnosis of various causes thereof; detecting of one or more non-ovarian cancer conditions that may elevate serum levels of ovary related markers, including but not limited to: cancers of the endometrium, cervix, fallopian tubes, pancreas, breast, lung and colon; nonmalignant conditions such as pregnancy, endometriosis, pelvic inflammatory disease and uterine fibroids; diagnosing conditions which have similar symptoms, signs and complications as ovarian cancer and where the differential diagnosis between them and ovarian cancer is of clinical importance including but not limited to: non-malignant causes of pelvic mass, including, but not limited to: benign (functional) ovarian cyst, uterine fibroids, endometriosis, benign ovarian neoplasms and inflammatory bowel lesions; determining a cause of any condition suggestive of a malignant tumor including but not limited to anorexia, cachexia, weight loss, fever, hypercalcemia, skeletal or abdominal pain, paraneoplastic syndrome, or ascites.

[0166] In some embodiments, the polypeptides and/or polynucleotides of this invention may be used in the diagnosis, treatment or prognostic assessment of ovarian cancer, alone or in combination with one or more polypeptides and/or polynucleotides of this invention, and/or in combination with known markers for ovarian cancer, including but not limited to CEA, CA125 (Mucin 16), CA72-4TAG, CA-50, CA 54-61, CA-195 and CA 19-9 in combination with CA-125, and/or in combination with the known protein(s) associated with the indicated polypeptide or polynucleotide, as described herein.

[0167] With regard to renal disease, and/or condition, the polypeptides and/or polynucleotides of this invention may be used for the diagnosis, treatment selection and monitoring, or assessment of prognosis of any type of renal disease, and/or condition including but not limited to any type of renal damage; renal cancer, including but not limited to renal cell carcinoma; polycystic kidney disease; Diabetes induced nephropathy; Chronic Kidney Disease; Total Kidney Failure; Autoimmune nephropathy, including but not limited to Systemic lupus erythematosus (SLE), Goodpasture's syndrome, IgA nephropathy; Hereditary Nephritis (Alport Syndrome); Infection-related Glomerular Disease, including but not limited to Acute post-streptococcal glomerulonephritis (PSGN), Bacterial endocarditis, HIV; Glomerulosclerosis; Focal segmental glomerulosclerosis (FSGS); Membranous nephropathy; Minimal change disease (MCD).

[0168] In some embodiments, the polypeptides/polynucleotides of this invention may be used for the diagnosis, treatment selection and monitoring, or assessment of prognosis of any type of renal disease, and/or condition in conjunction with other screening procedures and/or other markers, including but not limited to urinary protein, creatinine or creatinine clearance, and/or markers used for the diagnosis or assessment of prognosis of renal cancer, specifically of renal cell carcinoma, including but not limited to vascular endothelial growth factor, interleukin-12, the soluble interleukin-2 receptor, intercellular adhesion molecule-1, human chorionic gonadotropin beta, insulin-like growth factor-1 receptor, Carbonic anhydrase 9 (CA 9), endostatin, Thymidine phosphorylase or combinations thereof.

[0169] Detecting specific expression may in some embodiments be performed with a NAT-based technology (optionally comprising at least one nucleotide probe or primer), and/or with an immunoassay (optionally comprising an antibody according to any of the embodiments described herein).

[0170] In some embodiments, this invention provides a method of detecting, treating and/or assessing prognosis of a disease, disorder or condition, comprising detecting polypeptides and/or polynucleotides of this invention. In some embodiments, such methods are also referred to herein as methods of screening for variant-detectable disease, whereby the detection of variant expression serves as an indicator for the disease. In some embodiments, such detection may make use of a biomarker, antibody or any method or assay as described herein.

[0171] In some embodiments, this invention provides a method for screening for a disease, comprising detecting expression of:
[0172] a. a polypeptide having an amino acid sequence as set forth in SEQ ID NOs: 33-36, 77-86, 139-144, 183-186, 213-217, 354-355, 469-477, 488-490, or a homologue or fragment thereof;
[0173] b. a polypeptide comprising a bridge, edge portion, tail, or head portion, wherein said polypeptide has an amino acid sequence as set forth in SEQ ID NOs:494-523, 531-534 or a homologue or fragment thereof;
[0174] c. a polynucleotide having a nucleic acid sequence as set forth in SEQ ID NOs: 1-3, 37-52, 87-92, 155-158, 187-193, 334, 345-346, 421, 440-449, 478-480, or a homologue or fragment thereof;
[0175] d. a polynucleotide comprising a node having a nucleic acid sequence as set forth in SEQ ID NOs: 4-28, 53-72, 93-132, 159-171, 194-204, 347-349, 450-461, 481-484;
[0176] e. an antibody capable of specifically binding to at least one epitope of a polypeptide comprising an amino acid sequence as set forth in SEQ ID NOs: 33-36, 77-86, 139-144, 183-186, 213-217, 354-355, 469-477, 488-490, 494-523, 531-534;
[0177] f. an oligonucleotide having a nucleic acid sequence as set forth in SEQ ID NOs:234, 237, 240, 243, 267, 270, 273, 276, 279, 285, 288, 292-296, 358, 361, 364, 367, 370, 385, 394, 397, 400, 403, 492, 493, 524-530;
[0178] g. a primer pair, comprising a pair of isolated oligonucleotides capable of specifically hybridizing to at least a portion of a polynucleotide having a nucleic acid sequence as set forth in SEQ ID NOs: 234, 237, 240, 243, 267, 270, 273, 276, 279, 285, 288, 358, 361, 364, 367, 370, 385, 394, 397, 400, 403; or homologous thereto;
[0179] h. a primer pair, comprising a pair of isolated oligonucleotides capable of specifically hybridizing to at least a portion of a polynucleotide having a nucleic acid sequence as set forth in SEQ ID NOs:232-233, 235-236, 238-239, 241-242, 265-266, 268-269, 271-272, 274-275, 277-278, 283-284, 286-287, 356-357, 359-360, 362-363, 365-366, 368-369, 383-384, 392-393, 395-396, 398-399, 401-402,
   whereby qualitative or quantitative differences in expression as compared to an index sample is indicator for the treatment, diagnosis or assessment of prognosis of the disease, disorder or condition.

[0180] In some embodiments, a method of this invention may make use of a polynucleotide, polypeptide, vector, antibody, biomarker, or combination thereof, as described herein, including any embodiments thereof.

[0181] In some embodiments, the methods of this invention may be conducted on a cell or tissue or body fluid sample isolated from a subject having, predisposed to, or suspected of having the disease disorder or condition. In some embodiments, the methods are directed to the monitoring of disease progression and/or treatment efficacy and/or relapse of the indicated disease, disorder or condition.

[0182] In another embodiment, this invention provides methods for the selection of a particular therapy, or optimization of a given therapy for a disease, disorder or condition, the method comprising quantitatively and/or qualitatively determining or assessing expression of the polypeptides and/or polynucleotides, whereby differences in expression from an index sample, or a sample taken from a subject prior to the initiation of the therapy, or during the course of therapy, is indicative of the efficacy, or optimal activity of the therapy.

[0183] In another embodiment, this invention provides an isolated nucleic acid molecule encoding for a splice variant according to the present invention, having a nucleotide sequence as set forth in any one of the sequences listed herein, or a sequence complementary thereto. In another embodiment, this invention provides an isolated nucleic acid molecule, having a nucleotide sequence as set forth in any one of the sequences listed herein, or a sequence complementary thereto. In another embodiment, this invention provides an oligonucleotide of at least about 12 nucleotides, specifically hybridizable with the nucleic acid molecules of this invention. In another embodiment, this invention provides vectors, cells, liposomes and compositions comprising the isolated nucleic acids of this invention.

[0184] In another embodiment, this invention provides a method for detecting a splice variant nucleic acid sequence in a biological sample, comprising: hybridizing the isolated nucleic acid molecules or oligonucleotide fragments of at least about 12 nucleotides thereof to a nucleic acid material of a biological sample and detecting a hybridization complex; wherein the presence of a hybridization complex correlates with the presence of a splice variant nucleic acid sequence in the biological sample.

[0185] According to optional but preferred embodiments of the present invention, any marker according to the present invention may optionally be used alone or combination. Such a combination may optionally comprise a plurality of markers described herein, optionally including any subcombination of markers, and/or a combination featuring at least one other marker, for example a known marker. Furthermore, such a combination may optionally and preferably be used as described above with regard to determining a ratio between a quantitative or semi-quantitative measurement of any marker described herein to any other marker described herein, and/or any other known marker, and/or any other marker. With regard to such a ratio between any marker described herein (or a combination thereof) and a known marker, more preferably the known marker comprises the “known protein” as described in greater detail below with regard to each cluster or gene.

[0186] According to preferred embodiments of the present invention, there is provided a method for detecting a Marker-detectable disease, comprising detecting specific expression of a splice variant as described herein.

[0187] According to preferred embodiments of the present invention, there is provided a method for screening for variant-detectable disease, comprising detecting cells affected by a Marker-detectable disease with a biomarker or a method or assay as described herein.

[0188] According to preferred embodiments of the present invention, there is provided a method for diagnosing a marker-detectable disease, comprising detecting cells affected by Marker-detectable disease with a biomarker or a method or assay according to any of the above claims.

[0189] According to preferred embodiments of the present invention, there is provided a method for monitoring disease progression and/or treatment efficacy and/or relapse of Marker-detectable disease, comprising detecting cells affected by Marker-detectable disease with a biomarker or a method or assay according to any of the above claims.

[0190] According to preferred embodiments of the present invention, there is provided a method of selecting a therapy for a marker-detectable disease, comprising detecting cells affected by a marker-detectable disease with a biomarker or a method or assay according to any of the above claims and selecting a therapy according to said detection.

[0191] There is also optionally provided a method for screening for variant-detectable disease, comprising detecting cells affected by a Marker-detectable disease with a biomarker or a method or assay according to any of the above embodiments.

[0192] There is also optionally provided a method for diagnosing a marker-detectable disease, comprising detecting cells affected by Marker-detectable disease with a biomarker or a method or assay according to any of the above embodiments.

[0193] There is also optionally provided a method for monitoring disease progression and/or treatment efficacy and/or relapse of Marker-detectable disease, comprising detecting cells affected by Marker-detectable disease with a biomarker or a method or assay according to any of the above embodiments.

[0194] There is also optionally provided a method of selecting a therapy for a marker-detectable disease, comprising detecting cells affected by a marker-detectable disease with a biomarker or a method or assay according to any of the above embodiments and selecting a therapy according to said detection.

[0195] According to some embodiments of the present invention, any of the above nucleic acid and/or amino acid sequences further comprises any sequence having at least about 70%, at least about 80%, at least about 90%, least about 95% homology to the polynucleotides herein described.

[0196] The nucleic acid sequences and/or amino acid sequences shown herein as embodiments of the present invention relate, in some embodiments, to their isolated form, as isolated polynucleotides (including for all transcripts), oligonucleotides (including for all segments, amplicons and primers), peptides (including for all tails, bridges, insertions or heads, optionally including other antibody epitopes as described herein) and/or polypeptides (including for all proteins). It should be noted that the terms “oligonucleotide” and “polynucleotide”, or “peptide” and “polypeptide”, may optionally be used interchangeably.

[0197] All technical and scientific terms used herein should be understood to have the meaning commonly understood by a person skilled in the art to which this invention belongs, as well as any other specified description. The following references provide one of skill with a general definition of many of the terms used in this invention: Singleton et al., Dictionary of Microbiology and Molecular Biology (2nd ed. 1994); The Cambridge Dictionary of Science and Technology (Walker ed., 1988); The Glossary of Genetics, 5th Ed., R. Rieger et al. (eds.), Springer Verlag (1991); and Hale & Marham, The Harper Collins Dictionary of Biology (1991). All of these are hereby incorporated by reference as if fully set forth herein.

### BRIEF DESCRIPTION OF THE DRAWINGS

[0198] The invention is herein described, by way of example only, with reference to the accompanying drawings. With specific reference now to the drawings in detail, it is stressed that the particulars shown are by way of example and for purposes of illustrative discussion of the preferred embodiments of the present invention only, and are presented in the cause of providing what is believed to be the most useful and readily understood description of the principles and conceptual aspects of the invention. In this regard, no attempt is made to show structural details of the invention in more detail than is necessary for a fundamental understanding of the invention, the description taken with the drawings making apparent to those skilled in the art how the several forms of the invention may be embodied in practice.

[0199] In the drawings:

[0200] FIG. 1 shows a schematic description of the cancer biomarker selection engine.

[0201] FIG. 2 shows a schematic illustration, depicting grouping of transcripts of a given cluster based on presence or absence of unique sequence regions.

[0202] FIG. 3 shows a schematic summary of quantitative real-time PCR analysis.

[0203] FIG. 4 is schematic presentation of the oligonucleotide based microarray fabrication.

[0204] FIG. 5 is schematic summary of the oligonucleotide based microarray experimental flow.

[0205] FIG. 6 shows cancer and cell-line vs. normal tissue expression for cluster AA383349, demonstrating overexpression in epithelial malignant tumors.

[0206] FIG. 7 is a histogram showing over expression of the Homo sapiens protein phosphatase 2a, catalytic subunit, zeta isoform (PPP2CZ) transcripts for transcripts detectable by or according to seg34WT-AA383349 (SEQ ID NO: 358) in cancerous Breast samples relative to the normal samples. FIG. 7A shows the results on a testing panel as described in Table 1_{—}3, while FIG. 7B shows the results on an enlarged panel presented in Table 1_{—}7.

[0207] FIG. 8 shows the results of real time PCR measurement of expression of transcripts detectable by or according to AA383349_seg34WT (SEQ ID NO: 358). FIG. 8A shows the results on normal panel as described in Table 1_{—}9, while FIG. 8B shows the results on an enlarged panel presented in Table 1_{—}10.

[0208] FIG. 9 is a histogram showing over expression of the protein phosphatase 2a AA383349 transcripts which are detectable by amplicon as depicted in sequence name AA383349_seg32 (SEQ ID NO: 361) in normal and cancerous Breast tissues. FIG. 9A shows the results on a testing panel as described in Table 1_{—}3, while FIG. 9B shows the results on an enlarged panel presented in Table 1_{—}7.

[0209] FIG. 10 is a histogram showing Expression of protein phosphatase 2a AA383349 transcripts which are detectable by amplicon as depicted in sequence name AA383349_seg32 (SEQ ID NO: 361) in different normal tissues. FIG. 10A shows the results on normal panel as described in Table 1_{—}9, while FIG. 10B shows the results on an enlarged panel presented in Table 1_{—}10.

[0210] FIG. 11 shows cancer and cell-line vs. normal tissue expression of cluster AA583399, demonstrating overexpression in brain malignant tumors, epithelial malignant tumors, a mixture of malignant tumors from different tissues and gastric carcinoma.

[0211] FIG. 12 is a histogram showing over expression of the Homo sapiens myeloma overexpressed gene (in a subset of t(11;14) positive multiple myelomas) (MYEOV) transcripts detectable by or according to AA583399_seg1 (SEQ ID NO: 364) in cancerous Lung samples relative to the normal samples. FIG. 12A shows the results on a testing panel as described in Table 1_{—}2, while FIG. 12B shows the results on an enlarged panel presented in Table 1_{—}6.

[0212] FIG. 13 is a histogram showing over expression of the Homo sapiens myeloma overexpressed gene (in a subset of t(11;14) positive multiple myelomas) (MYEOV) transcripts in cancerous Ovary samples relative to the normal samples for transcripts detectable by or according to AA583399_seg1 (SEQ ID NO: 364).

[0213] FIG. 14 shows the result of expression of Homo sapiens myeloma overexpressed gene (in a subset of t(11;14) positive multiple myelomas) (MYEOV) AA583399 transcripts which are detectable by amplicon as depicted in sequence name AA583399_seg1 (SEQ ID NO: 364) in different normal tissues. FIG. 14A shows the results on normal panel as described in Table 1_{—}9, while FIGS. 14B-C show the results on an enlarged panel presented in Table 1_{—}10. FIG. 14B presents the expression of each sample relative to the median of the colon samples; FIG. 14C presents the expression of each sample relative to the median of the lung samples.

[0214] FIG. 15 is a histogram showing over expression of the Homo sapiens myeloma overexpressed gene (in a subset of t(11;14) positive multiple myelomas) (MYEOV) transcripts detectable by or according to AA583399 seg17 (SEQ ID NO: 367) in cancerous Lung samples relative to the normal samples. FIG. 15A shows the results on a testing panel as described in Table 1_{—}2, while FIG. 15B shows the results on an enlarged panel presented in Table 1_{—}6.

[0215] FIG. 16 is a histogram showing over expression of the Homo sapiens myeloma overexpressed gene (in a subset of t(11;14) positive multiple myelomas) (MYEOV) transcripts detectable by or according to AA583399_seg17 (SEQ ID NO: 367) in cancerous Ovary samples relative to the normal samples. FIG. 16A shows the results on a testing panel as described in Table 1_{—}1, while FIG. 16B shows the results on an enlarged panel presented in Table 1_{—}5.

[0216] FIG. 17 shows expression of Homo sapiens myeloma overexpressed gene (in a subset of t(11;14) positive multiple myelomas) (MYEOV) AA583399 transcripts which are detectable by amplicon as depicted in sequence name AA583399 seg17 (SEQ ID NO: 367) in different normal tissues. FIG. 17A shows the results on normal panel as described in Table 1_{—}9, while FIGS. 17B-C show the results on an enlarged panel presented in Table 1_{—}10. FIG. 17B presents the expression of each sample relative to the median of the lung samples; FIG. 17C presents the expression of each sample relative to the median of the colon samples.

[0217] FIG. 18 is a histogram showing over expression of the Homo sapiens myeloma overexpressed gene (in a subset of t(11;14) positive multiple myelomas) (MYEOV) transcripts detectable by or according to AA583399_seg30-32 (SEQ ID NO: 370) in cancerous Lung samples relative to the normal samples.

[0218] FIG. 19 is a histogram showing over expression of the Homo sapiens myeloma overexpressed gene (in a subset of t(11;14) positive multiple myelomas) (MYEOV) transcripts detectable by or according to AA583399_seg30-32 (SEQ ID NO: 370) in cancerous Ovary samples relative to the normal samples.

[0219] FIG. 20 shows Expression of Homo sapiens myeloma overexpressed gene (in a subset of t(11;14) positive multiple myelomas) (MYEOV) AA583399 transcripts which are detectable by amplicon as depicted in sequence name AA583399 seg30-32 (SEQ ID NO: 370) in different normal tissues.

[0220] FIG. 21 is a histogram showing over expression of Homo sapiens myeloma overexpressed gene (in a subset of t(11;14) positive multiple myelomas) (MYEOV) AA583399 transcripts which are detectable by amplicon as depicted in sequence name AA583399_seg17 (SEQ ID NO: 367) in normal and cancerous Colon tissues.

[0221] FIG. 22 is a histogram showing down regulation of Homo sapiens myeloma overexpressed gene (in a subset of t(11;14) positive multiple myelomas) (MYEOV) AA583399 transcripts which are detectable by amplicon as depicted in sequence name AA583399 seg17 (SEQ ID NO: 367) in cancerous Breast samples relative to the normal samples.

[0222] FIG. 23 shows cancer and cell-line vs. normal tissue expression for cluster H13410.

[0223] FIG. 24 is a histogram showing over expression of Homo sapiens maba1 transcripts detectable by or according to H13410_seg10WTF2R2 (SEQ ID NO: 234) in cancerous lung samples relative to the normal samples.

[0224] FIG. 25 is a histogram showing over expression of the Homo sapiens maba1 transcripts detectable by or according to H13410_seg10WTF2R2 (SEQ ID NO: 234) in cancerous Ovary samples relative to the normal samples. FIG. 25A shows the results on a testing panel as described in Table 1_{—}1, while FIGS. 25B and 25C show the results on an enlarged panel presented in Table 1_{—}5. In FIG. 25B the samples are arranged according to the patient's age, and in FIG. 25C samples are arranged according to the stage of cancer of the patient.

[0225] FIG. 26 shows expression of Homo sapiens maba1 H13410 transcripts which are detectable by amplicon as depicted in sequence name H13410_seg10WTF2R2 (SEQ ID NO: 234) in different normal tissues. FIG. 26A shows the results on normal panel as described in Table 1_{—}9, while FIGS. 26B-D show the results on an enlarged panel presented in Table 1_{—}10. FIG. 26B presents the expression of each sample relative to the median of the breast samples; FIG. 26C presents the expression of each sample relative to the median of the ovary samples, FIG. 26D presents the expression of each sample relative to the median of the lung samples.

[0226] FIG. 27 is a histogram showing over expression of the Homo sapiens maba1 H13410 transcripts which are detectable by amplicon as depicted in sequence name H13410_seg12 (SEQ ID NO: 237) in normal and cancerous Breast tissues. FIG. 27A shows the results on a testing panel as described in Table 1_{—}3, while FIGS. 27B and 27C show the results on an enlarged panel presented in Table 1_{—}7. In FIG. 27B the cancer samples are arranged according to the stage of the cancer from the patient, and in FIG. 27C the samples are arranged according to patient's age.

[0227] FIG. 28 is a histogram showing over expression of the Homo sapiens maba1 (SEQ ID NO: 133) H13410 transcripts which are detectable by amplicon as depicted in sequence name H13410_seg12 (SEQ ID NO: 237) in cancerous Lung samples relative to the normal samples.

[0228] FIG. 29 is a histogram showing over expression of the Homo sapiens maba1 (SEQ ID NO: 133) H13410 transcripts which are detectable by amplicon as depicted in sequence name H13410_seg33 (SEQ ID NO: 240) in normal and cancerous Breast tissues. FIG. 29A shows the results on a testing panel as described in Table 1_{—}3, while FIG. 29B show the results on an enlarged panel presented in Table 1_{—}7.

[0229] FIG. 30 is a histogram showing over expression of the Homo sapiens maba1 (SEQ ID NO: 133) H13410 transcripts which are detectable by amplicon as depicted in sequence name H13410_seg33 (SEQ ID NO: 240) in cancerous Lung samples relative to the normal samples.

[0230] FIG. 31 is a histogram showing over expression of the Expression of Homo sapiens maba1 H13410 transcripts which are detectable by amplicon as depicted in sequence name H13410_seg58 (SEQ ID NO: 243) in normal and cancerous Breast tissues. FIG. 31A shows the results on a testing panel as described in Table 1_{—}3, while FIG. 31B show the results on an enlarged panel presented in Table 1_{—}7. In FIG. 31B—the cancer samples are arranged according to the stage of the cancer from the patient, and in FIG. 31C the samples are arranged according to the age of the patient.

[0231] FIG. 32 is a histogram showing over expression of the Homo sapiens maba1 (SEQ ID NO: 133) H13410 transcripts which are detectable by amplicon as depicted in sequence name H13410_seg58 (SEQ ID NO: 243) in cancerous Lung samples relative to the normal samples.

[0232] FIG. 33 is a histogram showing the Expression of Homo sapiens maba1 H13410 transcripts which are detectable by amplicon as depicted in sequence name H13410_seg58 (SEQ ID NO: 243) in different normal tissues. FIG. 33A shows the results on normal panel as described in Table 1_{—}9, while FIGS. 33B-D show the results on an enlarged panel presented in Table 1_{—}10. FIG. 33B presents the expression of each sample relative to the median of the breast samples; FIG. 33C presents the expression of each sample relative to the median of the ovary samples, FIG. 33D presents the expression of each sample relative to the median of the lung samples.

[0233] FIG. 34 is a histogram showing the expression of Homo sapiens maba1 H13410 transcripts which are detectable by amplicon as depicted in sequence name H13410_seg12 (SEQ ID NO: 237) in different normal tissues. FIG. 34A shows the results on normal panel as described in Table 1_{—}9, while FIGS. 34B-D show the results on an enlarged panel presented in Table 1_{—}10. FIG. 34B presents the expression of each sample relative to the median of the breast samples; FIG. 34C presents the expression of each sample relative to the median of the ovary samples, FIG. 34D presents the expression of each sample relative to the median of the lung samples.

[0234] FIG. 35 is a histogram showing the expression of Homo sapiens maba1 H13410 transcripts which are detectable by amplicon as depicted in sequence name H13410_seg33 (SEQ ID NO: 240) in different normal tissues. FIG. 35A shows the results on normal panel as described in Table 1_{—}9, while FIGS. 35B-D show the results on an enlarged panel presented in Table 1_{—}10. FIG. 355B presents the expression of each sample relative to the median of the breast samples; FIG. 35C presents the expression of each sample relative to the median of the ovary samples, FIG. 35D presents the expression of each sample relative to the median of the lung samples.

[0235] FIG. 36 is a histogram showing the expression of Homo sapiens maba1 (KIAA1324) H13410 transcripts which are detectable by amplicon as depicted in sequence name H13410_seg12 (SEQ ID NO: 237) in normal and cancerous Ovary tissues. FIG. 36A shows the results on a testing panel as described in Table 1_{—}1, while FIGS. 36B-C show the results on an enlarged panel presented in Table 1_{—}5. In FIG. 36B the samples are arranged according to the patient's age, and in FIG. 36C samples are arranged according to the stage of the cancer from the patient.

[0236] FIG. 37 is a histogram showing the expression of Homo sapiens maba1 (KIAA1324) H13410 transcripts which are detectable by amplicon as depicted in sequence name H13410_seg33 (SEQ ID NO: 240) in normal and cancerous Ovary tissues. FIG. 37A shows the results on a testing panel as described in Table 1_{—}1, while FIGS. 37B-C show the results on an enlarged panel presented in Table 1_{—}5. In FIG. 37B the samples are arranged according to the patient's age, and in FIG. 37C samples are arranged according to the patient's stage.

[0237] FIG. 38 is a histogram showing the expression of Homo sapiens maba1 (KIAA1324) H13410 transcripts which are detectable by amplicon as depicted in sequence name H13410_seg58 (SEQ ID NO: 243) in normal and cancerous Ovary tissues. FIG. 38A shows the results on a testing panel as described in Table 1_{—}1, while FIGS. 388B-C show the results on an enlarged panel presented in Table 1_{—}5. In FIG. 388B the samples are arranged according to the patient's age, and in FIG. 38C samples are arranged according to the patient's stage.

[0238] FIG. 39 is a histogram showing over expression of the above-indicated Homo sapiens maba1 (KIAA1324) H13410 transcripts which are detectable by amplicon as depicted in sequence name H13410_junc20-27F2R2 (SEQ ID NO: 385) in cancerous Breast samples relative to the normal samples.

[0239] FIG. 40 is a histogram showing over expression of the above-indicated Homo sapiens maba1 (KIAA1324) H13410 transcripts which are detectable by amplicon as depicted in sequence name H13410_junc20-27F2R2 (SEQ ID NO: 385) in different normal samples.

[0240] FIG. 41 is a histogram showing over expression of the above-indicated Homo sapiens maba1 (KIAA1324) H13410 transcripts which are detectable by amplicon as depicted in sequence name H13410_junc20-27F2R2 (SEQ ID NO: 385) in cancerous Ovary samples relative to the normal samples.

[0241] FIG. 42 shows cancer and cell-line vs. normal tissue expression in cluster H61775, showing overexpression in brain malignant tumors and a mixture of malignant tumors from different tissues.

[0242] FIG. 43 is a histogram showing over expression of the Homo sapiens immunoglobulin superfamily, member 9 (IGSF9) transcripts detectable by or according to H61775 seg8 (SEQ ID NO: 267) in cancerous Breast samples relative to the normal samples. FIG. 43A shows the results on a testing panel as described in Table 1_{—}3, while FIG. 43B shows the results on an enlarged panel presented in Table 1_{—}7.

[0243] FIG. 44 is a histogram showing over expression of the Homo sapiens immunoglobulin superfamily, member 9 (IGSF9) transcripts detectable by or according to H61775_seg12WT (SEQ ID NO: 270) in cancerous Ovary samples relative to the normal samples. FIG. 44A shows the results on a testing panel as described in Table 1_{—}1, while FIG. 44B shows the results on an enlarged panel presented in Table 1_{—}5.

[0244] FIG. 45 is a histogram showing over expression of the Homo sapiens immunoglobulin superfamily, member 9 (IGSF9) transcripts detectable by or according to H61775_seg12WT (SEQ ID NO: 270) in cancerous Lung samples relative to the normal samples. FIG. 45A shows the results on a testing panel as described in Table 1_{—}2, while FIG. 45B shows the results on an enlarged panel presented in Table 1_{—}6.

[0245] FIG. 46 is a histogram showing over expression of the Homo sapiens immunoglobulin superfamily, member 9 (IGSF9) transcripts detectable by or according to H61775_seg12WT (SEQ ID NO: 270) in cancerous Breast samples relative to the normal samples.

[0246] FIG. 47 shows expression of Homo sapiens immunoglobulin superfamily, member 9 (IGSF9) H61775 transcripts which are detectable by amplicon as depicted in sequence name H61775_seg12WT (SEQ ID NO: 270) in different normal tissues. FIG. 47A shows the results on normal panel as described in Table 1_{—}9, while FIGS. 47B-C show the results on an enlarged panel presented in Table 10. FIG. 47B presents the expression of each sample relative to the median of the ovary samples; FIG. 47C presents the expression of each sample relative to the median of the lung samples.

[0247] FIG. 48 is a histogram showing the expression of Homo sapiens immunoglobulin superfamily, member 9 (IGSF9) H61775 transcripts which are detectable by amplicon as depicted in sequence name H61775_seg8F2R2 (SEQ ID NO: 267) in normal and cancerous Lung tissues.

[0248] FIG. 49 is a histogram showing the Expression of Homo sapiens immunoglobulin superfamily, member 9 (IGSF9) H61775 transcripts which are detectable by amplicon as depicted in sequence name H61775_seg8F2R2 (SEQ ID NO: 267) in different normal tissues.

[0249] FIG. 50 is a histogram showing the Expression of Homo sapiens immunoglobulin superfamily, member 9 (IGSF9) H61775 transcripts which are detectable by amplicon as depicted in sequence name H61775_seg8F2R2 (SEQ ID NO: 267) in normal and cancerous Ovary tissues.

[0250] FIG. 51 is a histogram showing expression of Homo sapiens immunoglobulin superfamily, member 9 (IGSF9) H61775 transcripts which are detectable by amplicon as depicted in sequence name H61775_seg5-6F1R1 (SEQ ID NO: 394) in normal and cancerous Ovary tissues.

[0251] FIG. 52 is a histogram showing expression of Homo sapiens immunoglobulin superfamily, member 9 (IGSF9) H61775 transcripts which are detectable by amplicon as depicted in sequence name H61775_seg5-6F1R1 (SEQ ID NO: 394) in normal and cancerous lung tissues.

[0252] FIG. 53 is a histogram showing expression of Homo sapiens immunoglobulin superfamily, member 9 (IGSF9) H61775 transcripts which are detectable by amplicon as depicted in sequence name H61775_seg5-6F1R1 (SEQ ID NO: 394) in different normal tissues.

[0253] FIG. 54 is a histogram showing expression of Homo sapiens immunoglobulin superfamily, member 9 (IGSF9) H61775 transcripts which are detectable by amplicon as depicted in sequence name H61775_seg5-6F1R1 (SEQ ID NO: 394) in normal and cancerous breast tissues.

[0254] FIG. 55 shows cancer and cell-line vs. normal tissue expression for cluster HUMPAX8A, showing overexpression in ovarian carcinoma, a mixture of malignant tumors from different tissues, uterine malignancies and epithelial malignant tumors.

[0255] FIG. 56 is a histogram showing over-expression of Homo sapiens paired box gene 8 (PAX8)HUMPAX8A transcripts which are detectable by amplicon as depicted in sequence name HUMPAX8A seg23 (SEQ ID NO: 397) in normal and cancerous ovary tissues. FIG. 56A shows the results on a testing panel as described in Table 1_{—}1, while FIG. 56B shows the results on an enlarged panel presented in Table 1_{—}5.

[0256] FIG. 57 is a histogram showing over-expression of Homo sapiens paired box gene 8 (PAX8)HUMPAX8A transcripts which are detectable by amplicon as depicted in sequence name HUMPAX8A seg23 (SEQ ID NO: 397) in different normal tissues.

[0257] FIG. 58 shows cancer and cell-line vs. normal tissue expression for cluster N31842, showing overexpression in a mixture of malignant tumors from different tissues and epithelial malignant tumors.

[0258] FIG. 59 is a histogram showing over expression of the Homo sapiens homeo box C10 (HOXC10) transcripts detectable by or according to N31842_seg8WT (SEQ ID NO: 400) in cancerous lung samples relative to the normal samples. FIG. 59A shows the results on a testing panel as described in Table 1_{—}2, while FIG. 59B shows the results on an enlarged panel presented in Table 1_{—}6.

[0259] FIG. 60 shows expression of Homo sapiens homeo box C10 (HOXC10) N31842 transcripts which are detectable by amplicon as depicted in sequence name N31842_seg8 (SEQ ID NO: 400) in different normal tissues.

[0260] FIG. 61 is a histogram showing over expression of the Homo sapiens homeo box C10(HOXC10) transcripts detectable by or according to N31842_seg8 (SEQ ID NO: 400) in cancerous breast samples relative to the normal samples.

[0261] FIG. 62 is a histogram showing over expression of the Homo sapiens homeo box C10 (HOXC10) transcripts detectable by or according to N31842_seg6 (SEQ ID NO: 403) in cancerous Breast samples relative to the normal samples. FIG. 62A shows the results on a testing panel as described in Table 1_{—}3, while

[0262] FIG. 62B shows the results on an enlarged panel presented in Table 1_{—}7.

[0263] FIG. 63 shows expression of Homo sapiens homeo box C10 (HOXC10) N3 1842 transcripts which are detectable by amplicon as depicted in sequence name N31842_seg6 (SEQ ID NO: 403) in different normal tissues.

[0264] FIG. 63A shows the results on normal panel as described in Table 1_{—}9, while FIG. 63B shows the results on an enlarged panel presented in Table 1_{—}10.

[0265] FIG. 64 is a histogram showing overexpression of Homo sapiens homeo box C10 (HOXC10) N31842 transcripts which are detectable by amplicon as depicted in sequence name N31842_-seg6 (SEQ ID NO: 403) in normal and cancerous ovary tissues.

[0266] FIG. 65 is a histogram showing overexpression of Homo sapiens homeo box C10 (HOXC10) N31842 transcripts which are detectable by amplicon as depicted in sequence name N31842_seg6 (SEQ ID NO: 403) in normal and cancerous lung tissues.

[0267] FIG. 66 is a histogram showing over expression of the Homo sapiens LEM domain containing 1 (LEMD1) T58132 transcripts which are detectable by amplicon as depicted in sequence name T58132_seg6F2R2 (SEQ ID NO: 273) in normal and cancerous colon tissues. FIG. 66A shows the results on a testing panel as described in Table 1_{—}4, while FIG. 66B shows the results on an enlarged panel presented in Table 1_{—}8.

[0268] FIG. 67 is a histogram showing expression of Homo sapiens LEM domain containing 1 (LEMD1) T58132 transcripts which are detectable by amplicon as depicted in sequence name T58132_seg6F2R2 (SEQ ID NO: 273) in different normal tissues. FIG. 67A shows the results on normal panel as described in Table 1_{—}9, while FIGS. 67B-C show the results on an enlarged panel presented in Table 1_{—}10. FIG. 67B presents the expression of each sample relative to the median of the ovary samples; FIG. 67C presents the expression of each sample relative to the median of the colon samples.

[0269] FIG. 68 is a histogram showing over expression of the Homo sapiens LEM domain containing 1 (LEMD1) T58132 transcripts which are detectable by amplicon as depicted in sequence name T58132_seg8F2R2 (SEQ ID NO: 276) in normal and cancerous Colon tissues. FIG. 68A shows the results on a testing panel as described in Table 1_{—}4, while FIG. 689B shows the results on an enlarged panel presented in Table 1_{—}8.

[0270] FIG. 69 is a histogram showing over expression of the Homo sapiens LEM domain containing 1 (LEMD1) T58132 transcripts which are detectable by amplicon as depicted in sequence name T58132_seg21 (SEQ ID NO: 279) in normal and cancerous Colon tissues. FIG. 69A shows the results on a testing panel as described in Table 1_{—}4, while FIG. 69B shows the results on an enlarged panel presented in Table 1_{—}8.

[0271] FIG. 70 is a histogram showing the expression of Homo sapiens LEM domain containing 1 (LEMD1) T58132 transcripts which are detectable by amplicon as depicted in sequence name T58132_seg6F2R2 (SEQ ID NO: 273) in normal and cancerous Lung tissues. FIG. 70A shows the results on a testing panel as described in Table 1_{—}2, while FIG. 70B shows the results on an enlarged panel presented in Table 1_{—}6.

[0272] FIG. 71 is a histogram showing the expression of Homo sapiens LEM domain containing 1 (LEMD1) T58132 transcripts which are detectable by amplicon as depicted in sequence name T58132_seg6F2R2 (SEQ ID NO: 273) in normal and cancerous ovarian tissues. FIG. 71A shows the results on a testing panel as described in Table 1_{—}1, while FIG. 71B shows the results on an enlarged panel presented in Table 1_{—}5.

[0273] FIG. 72A is a histogram showing the expression of Homo sapiens LEM domain containing 1 (LEMD1) T58132 transcripts which are detectable by amplicon as depicted in sequence name T58132_seg8F2R2 (SEQ ID NO: 276) in normal and cancerous Lung tissues. FIG. 72A shows the results on a testing panel as described in Table 1_{—}2, while FIG. 72B shows the results on an enlarged panel presented in Table 1_{—}6.

[0274] FIG. 73 is a histogram showing the expression of Homo sapiens LEM domain containing 1 (LEMD1) T58132 transcripts which are detectable by amplicon as depicted in sequence name T58132_seg8F2R2 (SEQ ID NO: 276) in different normal tissues. FIG. 73A shows the results on normal panel as described in Table 1_{—}9, while FIGS. 73B-C show the results on an enlarged panel presented in Table 1_{—}10. FIG. 73B presents the expression of each sample relative to the median of the ovary samples; FIG. 73C presents the expression of each sample relative to the median of the colon samples.

[0275] FIG. 74 is a histogram showing the expression of Homo sapiens LEM domain containing 1 (LEMD1) T58132 transcripts which are detectable by amplicon as depicted in sequence name T58132_seg8F2R2 (SEQ ID NO: 276) in normal and cancerous ovary tissues. FIG. 74A shows the results on a testing panel as described in Table 1_{—}1, while FIG. 74B shows the results on an enlarged panel presented in Table 1_{—}5.

[0276] FIG. 75 is a histogram showing the expression of Homo sapiens LEM domain containing 1 (LEMD1) T58132 transcripts which are detectable by amplicon as depicted in sequence name T58132_seg21 (SEQ ID NO: 279) in normal and cancerous Lung tissues. FIG. 75A shows the results on a testing panel as described in Table 1_{—}2, while FIG. 75B shows the results on an enlarged panel presented in Table 1_{—}6.

[0277] FIG. 76 is a histogram showing the expression of Homo sapiens LEM domain containing 1 (LEMD1) T58132 transcripts which are detectable by amplicon as depicted in sequence name T58132_seg21 (SEQ ID NO: 279) in different normal tissues. FIG. 76A shows the results on normal panel as described in Table 1_{—}9, while FIGS. 76B-C show the results on an enlarged panel presented in Table 1_{—}10. FIG. 76B presents the expression of each sample relative to the median of the ovary samples; FIG. 76C presents the expression of each sample relative to the median of the colon samples.

[0278] FIG. 77 is a histogram showing the expression of Homo sapiens LEM domain containing 1 (LEMD1) T58132 transcripts which are detectable by amplicon as depicted in sequence name T58132_seg21 (SEQ ID NO: 279) in normal and cancerous ovary tissues. FIG. 77A shows the results on a testing panel as described in Table 1_{—}1, while FIG. 77B shows the results on an enlarged panel presented in Table 1_{—}5.

[0279] FIG. 78 shows cancer and cell-line vs. normal tissue expression for cluster T86235, showing overexpression in brain malignant tumors, a mixture of malignant tumors from different tissues, skin malignancies and epithelial malignant tumors.

[0280] FIG. 79 is a histogram showing over expression of the Homo sapiens trophinin associated protein (tastin) (TROAP) transcripts detectable by or according to T86235_seg44 (SEQ ID NO: 285) in cancerous Breast samples relative to the normal samples. FIG. 79A shows the results on a testing panel as described in Table 1_{—}3, while

[0281] FIG. 79B shows the results on an enlarged panel presented in Table 1_{—}7.

[0282] FIG. 80 is a histogram showing over expression of the Homo sapiens trophinin associated protein (tastin) (TROAP) transcripts detectable by or according to T86235_seg44 (SEQ ID NO: 285) in cancerous Ovary samples relative to the normal samples. FIG. 80A shows the results on a testing panel as described in Table 1_{—}1, while

[0283] FIG. 80B shows the results on an enlarged panel presented in Table 1_{—}5.

[0284] FIG. 81 shows expression of Homo sapiens trophinin associated protein (tastin) (TROAP) T86235 transcripts which are detectable by amplicon as depicted in sequence name T86235_seg44 (SEQ ID NO: 285) in different normal tissues. FIG. 81A shows the results on normal panel as described in Table 1_{—}9, while FIGS. 81B-D show the results on an enlarged panel presented in Table 1_{—}10. FIG. 81B presents the expression of each sample relative to the median of the lung samples; FIG. 81C presents the expression of each sample relative to the median of the ovary samples; FIG. 81D presents the expression of each sample relative to the median of the breast samples.

[0285] FIG. 82 is a histogram showing over expression of the Homo sapiens trophinin associated protein (tastin) (TROAP) transcripts detectable by or according to T86235_seg46-47WT (SEQ ID NO: 288) in cancerous Breast samples relative to the normal samples. FIG. 82 shows the results on a testing panel as described in Table 1_{—}3, while FIG. 82B shows the results on an enlarged panel presented in Table 1_{—}7.

[0286] FIG. 83 is a histogram showing over expression of the Homo sapiens trophinin associated protein (tastin) (TROAP) transcripts detectable by or according to T86235_seg46-47WT (SEQ ID NO: 288) in cancerous Lung samples relative to the normal samples. FIG. 83A shows the results on a testing panel as described in Table 1_{—}2, while FIG. 83B shows the results on an enlarged panel presented in Table 1_{—}6.

[0287] FIG. 84 is a histogram showing over expression of the Homo sapiens trophinin associated protein (tastin) (TROAP) transcripts detectable by or according to T86235_seg46-47WT (SEQ ID NO: 288) in cancerous Ovary samples relative to the normal samples. FIG. 84A shows the results on a testing panel as described in Table 1_{—}1, while FIG. 84B shows the results on an enlarged panel presented in Table 1_{—}5.

[0288] FIG. 85 shows expression of Homo sapiens trophinin associated protein (tastin) (TROAP) T86235 transcripts which are detectable by amplicon as depicted in sequence name T86235_seg46-47WT (SEQ ID NO: 288) in different normal tissues. FIG. 85A shows the results on normal panel as described in Table 1_{—}9, while FIGS. 85B-D show the results on an enlarged panel presented in Table 1_{—}10. FIG. 85B presents the expression of each sample relative to the median of the lung samples; FIG. 85C presents the expression of each sample relative to the median of the ovary samples; FIG. 85D presents the expression of each sample relative to the median of the breast samples.

[0289] FIG. 86 is a histogram showing over expression of the Homo sapiens trophinin associated protein (tastin) (TROAP) T86235 transcripts which are detectable by amplicon as depicted in sequence name T86235_seg44 (SEQ ID NO: 285) in normal and cancerous Lung tissues.

### DESCRIPTION OF EMBODIMENTS

[0290] The present invention provides, in some embodiments, polynucleotides and polypeptides and uses thereof, as further described herein. Polynucleotides and polypeptides described herein, in some embodiments, represent variants, which may optionally be used as diagnostic markers.

[0291] In some embodiments, these variants are useful as diagnostic markers for certain diseases, and as such the term “marker-detectable” or “variant-detectable” with regard to diseases is to be understood as encompassing use of the described polynucleotides and/or polypeptides.

[0292] In some embodiments, certain diseases are associated with differential expression, qualitatively or quantitatively, of the polynucleotides and polypeptides of this invention. Assessment of such expression, in turn, may in some embodiments, serve as a marker for a particular disease state, susceptibility, pathogenesis, etc., including any desired disease-specific event, whose analysis is useful, as will be appreciated by one skilled in the art. In one embodiment, such use as a marker is also referred to herein as the polynucleotides and polypeptides being “variant disease markers”.

[0293] The polynucleotides and polypeptides of the present invention, alone or in combination, in some embodiments, can be used for, and in some embodiments are a part of the methods of prognosis, prediction, screening, early diagnosis, staging, therapy selection and treatment monitoring of a marker-detectable disease. For example, in some embodiments, these markers may be used for the staging of disease in a patient (for example if the disease features cancer) and/or monitoring the progression of the disease. Furthermore, the markers of the present invention, alone or in combination, can be used for detection of the source of metastasis found in anatomical places other than the originating tissue, again in the example of cancer. Also, one or more of the markers may optionally be used in combination with one or more other disease markers (other than those described herein).

[0294] Biomolecular sequences (amino acid and/or nucleic acid sequences) uncovered using the methodology of the present invention and described herein can be efficiently utilized, in some embodiments, as tissue or pathological markers and/or as drugs or drug targets for treating or preventing a disease.

[0295] In some embodiments, these markers are released to the bloodstream under conditions of a particular disease, and/or are otherwise expressed at a much higher level and/or specifically expressed in tissue or cells afflicted with or demonstrating the disease. In some embodiments, the measurement of these markers, alone or in combination, in patient samples provides information that the diagnostician can correlate with a probable diagnosis of a particular disease and/or a condition that is indicative of a higher risk for a particular disease.

[0296] The present invention provides, in some embodiments, diagnostic assays for a marker-detectable disease and/or an indicative condition, and methods of use of such markers for detection of marker-detectable disease and/or an indicative condition, for example in a sample taken from a subject (patient), which in some embodiments, is a blood sample.

[0297] Some embodiments of this invention have been exemplified herein wherein cellular localization was determined via the use of four different software programs: (i) tmhmm (from Center for Biological Sequence Analysis, Technical University of Denmark DTU, www.cbs.dtu.dk/services/TMHMM/TMHMM2.0b.guide.php) or (ii) tmpred (from EMBnet, maintained by the ISREC Bionformatics group and the LICR Information Technology Office, Ludwig Institute for Cancer Research, Swiss Institute of Bioinformatics, www.ch.embnet.org/software/TMPRED_form.html) for transmembrane region prediction; (iii) signalp_hmm or (iv) signalp_nn (both from Center for Biological Sequence Analysis, Technical University of Denmark DTU, www.cbs.dtu.dk/services/SignalP/background/prediction.php) for signal peptide prediction. The terms “signalp_hmm” and “signalp_nn” refer to two modes of operation for the program SignalP: hmm refers to Hidden Markov Model, while nn refers to neural networks. Localization was also determined through manual inspection of known protein localization and/or gene structure, and the use of heuristics by the individual inventor. In some cases for the manual inspection of cellular localization prediction inventors used the ProLoc computational platform [Einat Hazkani-Covo, Erez Levanon, Galit Rotman, Dan Graur and Amit Novik; (2004) “Evolution of multicellularity in metazoa: comparative analysis of the subcellular localization of proteins in Saccharomyces, Drosophila and Caenorhabditis.” Cell Biology International 2004; 28(3):171-8.], which predicts protein localization based on various parameters including, protein domains (e.g., prediction of trans-membranous regions and localization thereof within the protein), pI, protein length, amino acid composition, homology to pre-annotated proteins, recognition of sequence patterns which direct the protein to a certain organelle (such as, nuclear localization signal, NLS, mitochondria localization signal), signal peptide and anchor modeling and using unique domains from Pfam that are specific to a single compartment.

[0298] Information is given in the text with regard to SNPs (single nucleotide polymorphisms). A description of the abbreviations is as follows. “T->C”, for example, means that the SNP results in a change at the position given in the table from T to C. Similarly, “M->Q”, for example, means that the SNP has caused a change in the corresponding amino acid sequence, from methionine (M) to glutamine (Q). If, in place of a letter at the right hand side for the nucleotide sequence SNP, there is a space, it indicates that a frameshift has occurred. A frameshift may also be indicated with a hyphen (-). A stop codon is indicated with an asterisk at the right hand side (*). As part of the description of an SNP, a comment may be found in parentheses after the above description of the SNP itself. This comment may include an FTId, which is an identifier to a SwissProt entry that was created with the indicated SNP. An FTId is a unique and stable feature identifier, which allows construction of links directly from position-specific annotation in the feature table to specialized protein-related databases. The FTId is always the last component of a feature in the description field, as follows: FTId=XXX_number, in which XXX is the 3-letter code for the specific feature key, separated by an underscore from a 6-digit number. In the table of the amino acid mutations of the wild type proteins of the selected splice variants of the invention, the header of the first column is “SNP position(s) on amino acid sequence”, representing a position of a known mutation on amino acid sequence. SNPs may optionally be used as diagnostic markers according to the present invention, alone or in combination with one or more other SNPs and/or any other diagnostic marker. Embodiments of the present invention comprise such SNPs, including but not limited to novel SNPs on the known (WT or wild type) protein sequences given below, as well as novel nucleic acid and/or amino acid sequences formed through such SNPs, and/or any SNP on a variant amino acid and/or nucleic acid sequence described herein.

[0299] Some embodiments of this invention have been exemplified herein wherein homology to known proteins was determined by Smith-Waterman version 5.1.2 using special (non default) parameters as follows:

model=sw.model

### GAPEXT=0

### GAPOP=100.0

[0300] MATRIX=blosum100

[0301] Some embodiments of this invention have been exemplified herein wherein overexpression of a cluster in cancer was a determination based on ESTs. A key to the p values with regard to the analysis of such overexpression is as follows:
[0302] library-based statistics: P-value without including the level of expression in cell-lines (P1)
[0303] library based statistics: P-value including the level of expression in cell-lines (P2)
[0304] EST clone statistics: P-value without including the level of expression in cell-lines (SP1)
[0305] EST clone statistics: predicted overexpression ratio without including the level of expression in cell-lines (R3)
[0306] EST clone statistics: P-value including the level of expression in cell-lines (SP2)
[0307] EST clone statistics: predicted overexpression ratio including the level of expression in cell-lines (R4)

[0308] Library-based statistics refer to statistics over an entire library, while EST clone statistics refer to expression only for ESTs from a particular tissue or cancer.

[0309] Some embodiments of this invention have been exemplified herein wherein overexpression of a cluster in cancer was a determination based on microarray use. As a microarray reference, in the specific segment paragraphs, the unabbreviated tissue name was used as the reference to the type of chip for which expression was measured. There are two types of microarray results: those from microarrays prepared according to a design by the present inventors, for which the microarray fabrication procedure is described in detail in Materials and Experimental Procedures section herein; and those results from microarrays using Affymetrix technology. As a microarray reference, in the specific segment paragraphs, the unabbreviated tissue name was used as the reference to the type of chip for which expression was measured. For microarrays prepared according to a design by the present inventors, the probe name begins with the name of the cluster (gene), followed by an identifying number. These probes are listed below with their respective sequences.

>HUMPAX8A_0_0_18307

(SEQ ID NO: 524)

TTTCCAGATGGATGGGTTCCAAAAGGGATGACAGAGGGACCTTCTGAGCT
>T86235_0_0_57380

(SEQ ID NO: 525)

AAGGCTTGGCTACAGTGCAAGGTTGGCTGAGCTGTGACAAGGTCTTCTCT
>T86235_0_0_57365

(SEQ ID NO: 526)

CATGGTAACACGGCCTCCATGGCTGAGTAGGGGACTAGGAAGGGTAAAAG
>HUMPAX8A_0_0_18296

(SEQ ID NO: 527)

AAAGACTCTGCAGCTCTGGCAGAACCACTAAGCTCTCAGCTCCTAGTCAT
>AA383349_0_8_0

(SEQ ID NO: 528)

TCCCTGAGGTACGAGTGTATGACCTGACACAATATGAGCACTGGCCAGAT
>T86235_0_7463

(SEQ ID NO: 492)

AGAAAGTAGCTCCAGCAGCACCCGAGAGGGTCAGGAGAAAAGCGGAGGAA
>N31842_0_5_42

(SEQ ID NO: 493)

CCTCCAGATGCCTGGCTTGGATGGCGTTGGAACAGGGCATTTGGAATGTT

[0310] Oligonucleotide microarray results taken from Affymetrix data were from chips available from Affymetrix Inc, Santa Clara, Calif., USA (see for example data regarding the Human Genome U133 (HG-U133) Set at www.affymetrix.com/products/arrays/specific/hgu133.affx; GeneChip Human Genome U133A 2.0 Array at www.affymetrix.com/products/arrays/specific/hgu133av2.affx; and Human Genome U133 Plus 2.0 Array at www.affymetrix.com/products/arrays/specific/hgu133plus.affx). The probe names follow the Affymetrix naming convention. The data is available from NCBI Gene Expression Omnibus (see www.ncbi.nlm.nih.gov/projects/geo/ and Edgar et al, Nucleic Acids Research, 2002, Vol. 30, No. 1 207-210). The dataset (including results) is available from www.ncbi.nlm.nih.gov/geo/query/acc.cgi?acc=GSE1133 for the Series GSE1133 database (published on March 2004); a reference to these results is as follows: Su et al (Proc Natl Acad Sci USA. 2004 Apr. 20; 101(16):6062-7. Epub 2004 Apr. 9).

[0311] Oligonucleotide microarray results taken from Affymetrix data were from chips available from Affymetrix Inc, Santa Clara, Calif., USA (see for example data regarding the Human Genome U133 (HG-U133) Set at www.affymetrix.com/products/arrays/specific/hgu133.affx; GeneChip Human Genome U133A 2.0 Array at www.affymetrix.com/products/arrays/specific/hgu133av2.affx; and Human Genome U133 Plus 2.0 Array at www.affymetrix.com/products/arrays/specific/hgu133plus.affx). The probe names follow the Affymetrix naming convention. The data is available from NCBI Gene Expression Omnibus (see www.ncbi.nlm.nih.gov/projects/geo/ and Edgar et al, Nucleic Acids Research, 2002, Vol. 30, No. 1 207-210). The dataset (including results) is available from www.ncbi.nlm.nih.gov/geo/query/acc.cgi?acc=GSE1133 for the Series GSE1133 database (published on March 2004); a reference to these results is as follows: Su et al (Proc Natl Acad Sci USA. 2004 Apr. 20; 101(16):6062-7. Epub 2004 Apr. 9).

[0312] The following list of abbreviations for tissues was used in the TAA histograms. The term “TAA” stands for “Tumor Associated Antigen”, and the TAA histograms, given in the text, represent the cancerous tissue expression pattern as predicted by the biomarkers selection engine, as described in detail in examples 1-5 below (the first word is the abbreviation while the second word is the full name):

(“BONE”, “bone”);
(“COL”, “colon”);
(“EPI”, “epithelial”);
(“GEN”, “general”);
(“LIVER”, “liver”);
(“LUN”, “lung”);
(“LYMPH”, “lymph nodes”);
(“MARROW”, “bone marrow”);
(“OVA”, “ovary”);
(“PANCREAS”, “pancreas”);
(“PRO”, “prostate”);
(“STOMACH”, “stomach”);
(“TCELL”, “T cells”);

### (“THYROID”, “Thyroid”);

[0313] (“MAM”, “breast”);
(“BRAIN”, “brain”);
(“UTERUS”, “uterus”);
(“SKIN”, “skin”);
(“KIDNEY”, “kidney”);
(“MUSCLE”, “muscle”);
(“ADREN”, “adrenal”);
(“HEAD”, “head and neck”);
(“BLADDER”, “bladder”);

[0314] It should be noted that the terms “segment”, “seg” and “node” (abbreviated as “N” in the names of nodes) are used interchangeably in reference to nucleic acid sequences of the present invention, they refer to portions of nucleic acid sequences that were shown to have one or more properties as described herein. They are also the building blocks that were used to construct complete nucleic acid sequences as described in greater detail elsewhere herein. Optionally and preferably, they are examples of oligonucleotides which are embodiments of the present invention, for example as amplicons, hybridization units and/or from which primers and/or complementary oligonucleotides may optionally be derived, and/or for any other use.

[0315] In some embodiments, the phrase “disease” refers to its commonly understood meaning, and includes, inter alia, any type of pathology and/or damage, including both chronic and acute damage, as well as a progress from acute to chronic damage.

[0316] In some embodiments, the phrase “marker” in the context of the present invention refers to a nucleic acid fragment, a peptide, or a polypeptide, which is differentially present in a sample taken from patients (subjects) having one of the herein-described diseases or conditions, as compared to a comparable sample taken from subjects who do not have one the above-described diseases or conditions.

[0317] In some embodiments, the phrase “differentially present” refers to differences in the quantity or quality of a marker present in a sample taken from patients having one of the herein-described diseases or conditions as compared to a comparable sample taken from patients who do not have one of the herein-described diseases or conditions. For example, a nucleic acid fragment may optionally be differentially present between the two samples if the amount of the nucleic acid fragment in one sample is significantly different from the amount of the nucleic acid fragment in the other sample, for example as measured by hybridization and/or NAT-based assays. A polypeptide is differentially present between the two samples if the amount of the polypeptide in one sample is significantly different from the amount of the polypeptide in the other sample. It should be noted that if the marker is detectable in one sample and not detectable in the other, then such a marker can be considered to be differentially present. Optionally, a relatively low amount of up-regulation may serve as the marker, as described herein. One of ordinary skill in the art could easily determine such relative levels of the markers; further guidance is provided in the description of each individual marker below.

[0318] In some embodiments, the phrase “diagnostic” means identifying the presence or nature of a pathologic condition. Diagnostic methods differ in their sensitivity and specificity. The “sensitivity” of a diagnostic assay is the percentage of diseased individuals who test positive (percent of “true positives”). Diseased individuals not detected by the assay are “false negatives.” Subjects who are not diseased and who test negative in the assay are termed “true negatives.” The “specificity” of a diagnostic assay is 1 minus the false positive rate, where the “false positive” rate is defined as the proportion of those without the disease who test positive. While a particular diagnostic method may not provide a definitive diagnosis of a condition, it suffices if the method provides a positive indication that aids in diagnosis.

[0319] In some embodiments, the phrase “qualitative” when in reference to differences in expression levels of a polynucleotide, polypeptide or cluster as described herein, refers to the presence versus absence of expression, or in some embodiments, the temporal regulation of expression, or in some embodiments, the timing of expression, or in some embodiments, the variant expressed, or in some embodiments, any post-translational modifications to the expressed molecule, and others, as will be appreciated by one skilled in the art. In some embodiments, the phrase “quantitative” when in reference to differences in expression levels of a polynucleotide, polypeptide or cluster as described herein, refers to absolute differences in quantity of expression, as determined by any means, known in the art, or in other embodiments, relative differences, which may be statistically significant, or in some embodiments, when viewed as a whole or over a prolonged period of time, etc., indicate a trend in terms of differences in expression.

[0320] In some embodiments, the term “diagnosing” refers to classifying a disease or a symptom, determining a severity of the disease, monitoring disease progression, forecasting an outcome of a disease and/or prospects of recovery. The term “detecting” may also optionally encompass any of the above.

[0321] Diagnosis of a disease according to the present invention can, in some embodiments, be effected by determining a level of a polynucleotide or a polypeptide of the present invention in a biological sample obtained from the subject, wherein the level determined can be correlated with predisposition to, or presence or absence of the disease. It should be noted that a “biological sample obtained from the subject” may also optionally comprise a sample that has not been physically removed from the subject, as described in greater detail below.

[0322] In some embodiments, the term “level” refers to expression levels of RNA and/or protein or to DNA copy number of a marker of the present invention.

[0323] Typically the level of the marker in a biological sample obtained from the subject is different (i.e., increased or decreased) from the level of the same variant in a similar sample obtained from a healthy individual (examples of biological samples are described herein).

[0324] Numerous well known tissue or fluid collection methods can be utilized to collect the biological sample from the subject in order to determine the level of DNA, RNA and/or polypeptide of the variant of interest in the subject.

[0325] Examples include, but are not limited to, fine needle biopsy, needle biopsy, core needle biopsy and surgical biopsy (e.g., brain biopsy), and lavage. Regardless of the procedure employed, once a biopsy/sample is obtained the level of the variant can be determined and a diagnosis can thus be made.

[0326] Determining the level of the same variant in normal tissues of the same origin is preferably effected along-side to detect an elevated expression and/or amplification and/or a decreased expression, of the variant as opposed to the normal tissues.

[0327] In some embodiments, the term “test amount” of a marker refers to an amount of a marker in a subject's sample that is consistent with a diagnosis of a particular disease or condition. A test amount can be either in absolute amount (e.g., microgram/ml) or a relative amount (e.g., relative intensity of signals).

[0328] In some embodiments, the term “control amount” of a marker can be any amount or a range of amounts to be compared against a test amount of a marker. For example, a control amount of a marker can be the amount of a marker in a patient with a particular disease or condition or a person without such a disease or condition. A control amount can be either in absolute amount (e.g., microgram/ml) or a relative amount (e.g., relative intensity of signals).

[0329] In some embodiments, the term “detect” refers to identifying the presence, absence or amount of the object to be detected.

[0330] In some embodiments, the term “label” includes any moiety or item detectable by spectroscopic, photo chemical, biochemical, immunochemical, or chemical means. For example, useful labels include 32P, 35S, fluorescent dyes, electron-dense reagents, enzymes (e.g., as commonly used in an ELISA), biotin-streptavadin, dioxigenin, haptens and proteins for which antisera or monoclonal antibodies are available, or nucleic acid molecules with a sequence complementary to a target. The label often generates a measurable signal, such as a radioactive, chromogenic, or fluorescent signal, that can be used to quantify the amount of bound label in a sample. The label can be incorporated in or attached to a primer or probe either covalently, or through ionic, van der Waals or hydrogen bonds, e.g., incorporation of radioactive nucleotides, or biotinylated nucleotides that are recognized by streptavadin. The label may be directly or indirectly detectable. Indirect detection can involve the binding of a second label to the first label, directly or indirectly. For example, the label can be the ligand of a binding partner, such as biotin, which is a binding partner for streptavadin, or a nucleotide sequence, which is the binding partner for a complementary sequence, to which it can specifically hybridize. The binding partner may itself be directly detectable, for example, an antibody may be itself labeled with a fluorescent molecule. The binding partner also may be indirectly detectable, for example, a nucleic acid having a complementary nucleotide sequence can be a part of a branched DNA molecule that is in turn detectable through hybridization with other labeled nucleic acid molecules (see, e.g., P. D. Fahrlander and A. Klausner, Bio/Technology 6:1165 (1988)). Quantitation of the signal is achieved by, e.g., scintillation counting, densitometry, or flow cytometry.

[0331] Exemplary detectable labels, optionally and preferably for use with immunoassays, include but are not limited to magnetic beads, fluorescent dyes, radiolabels, enzymes (e.g., horse radish peroxide, alkaline phosphatase and others commonly used in an ELISA), and calorimetric labels such as colloidal gold or colored glass or plastic beads. Alternatively, the marker in the sample can be detected using an indirect assay, wherein, for example, a second, labeled antibody is used to detect bound marker-specific antibody, and/or in a competition or inhibition assay wherein, for example, a monoclonal antibody which binds to a distinct epitope of the marker are incubated simultaneously with the mixture.

[0332] “Immunoassay” is an assay that uses an antibody to specifically bind an antigen. The immunoassay is characterized by the use of specific binding properties of a particular antibody to isolate, target, and/or quantify the antigen.

[0333] The phrase “specifically (or selectively) binds” to an antibody or “specifically (or selectively) immunoreactive with,” or “specifically interacts or binds” when referring to a protein or peptide (or other epitope), refers, in some embodiments, to a binding reaction that is determinative of the presence of the protein in a heterogeneous population of proteins and other biologics. Thus, under designated immunoassay conditions, the specified antibodies bind to a particular protein at least two times greater than the background (non-specific signal) and do not substantially bind in a significant amount to other proteins present in the sample. Specific binding to an antibody under such conditions may require an antibody that is selected for its specificity for a particular protein. For example, polyclonal antibodies raised to seminal basic protein from specific species such as rat, mouse, or human can be selected to obtain only those polyclonal antibodies that are specifically immunoreactive with seminal basic protein and not with other proteins, except for polymorphic variants and alleles of seminal basic protein. This selection may be achieved by subtracting out antibodies that cross-react with seminal basic protein molecules from other species. A variety of immunoassay formats may be used to select antibodies specifically immunoreactive with a particular protein. For example, solid-phase ELISA immunoassays are routinely used to select antibodies specifically immunoreactive with a protein (see, e.g., Harlow & Lane, Antibodies, A Laboratory Manual (1988), for a description of immunoassay formats and conditions that can be used to determine specific immunoreactivity). Typically a specific or selective reaction will be at least twice background signal or noise and more typically more than 10 to 100 times background.

[0334] In another embodiment, the present invention relates to bridges, tails, heads and/or insertions, and/or analogs, homologs and derivatives of such peptides. Such bridges, tails, heads and/or insertions are described in greater detail below with regard to the Examples.

[0335] In some embodiments, the term “tail” refers to a peptide sequence at the end of an amino acid sequence that is unique to a splice variant according to the present invention. Therefore, a splice variant having such a tail may optionally be considered as a chimera, in that at least a first portion of the splice variant is typically highly homologous (often 100% identical) to a portion of the corresponding known protein, while at least a second portion of the variant comprises the tail.

[0336] In some embodiments, the term “bead” refers to a peptide sequence at the beginning of an amino acid sequence that is unique to a splice variant according to the present invention. Therefore, a splice variant having such a head may optionally be considered as a chimera, in that at least a first portion of the splice variant comprises the head, while at least a second portion is typically highly homologous (often 100% identical) to a portion of the corresponding known protein.

[0337] In some embodiments, the term “an edge portion” refers to a connection between two portions of a splice variant according to the present invention that were not joined in the wild type or known protein. An edge may optionally arise due to a join between the above “known protein” portion of a variant and the tail, for example, and/or may occur if an internal portion of the wild type sequence is no longer present, such that two portions of the sequence are now contiguous in the splice variant that were not contiguous in the known protein. A “bridge” may optionally be an edge portion as described above, but may also include a join between a head and a “known protein” portion of a variant, or a join between a tail and a “known protein” portion of a variant, or a join between an insertion and a “known protein” portion of a variant.

[0338] In some embodiments, a bridge between a tail or a head or a unique insertion, and a “known protein” portion of a variant, comprises at least about 10 amino acids, or in some embodiments at least about 20 amino acids, or in some embodiments at least about 30 amino acids, or in some embodiments at least about 40 amino acids, in which at least one amino acid is from the tail/head/insertion and at least one amino acid is from the “known protein” portion of a variant. In some embodiments, the bridge may comprise any number of amino acids from about 10 to about 40 amino acids (for example, 10, 11, 12, 13 . . . 37, 38, 39, 40 amino acids in length, or any number in between).

[0339] It should be noted that a bridge cannot be extended beyond the length of the sequence in either direction, and it should be assumed that every bridge description is to be read in such manner that the bridge length does not extend beyond the sequence itself.

[0340] Furthermore, bridges are described with regard to a sliding window in certain contexts below. For example, certain descriptions of the bridges feature the following format: a bridge between two edges (in which a portion of the known protein is not present in the variant) may optionally be described as follows: a bridge portion of CONTIG-NAME_P1 (representing the name of the protein), comprising a polypeptide having a length “n”, wherein n is at least about 10 amino acids in length, optionally at least about 20 amino acids in length, preferably at least about 30 amino acids in length, more preferably at least about 40 amino acids in length and most preferably at least about 50 amino acids in length, wherein at least two amino acids comprise XX (2 amino acids in the center of the bridge, one from each end of the edge), having a structure as follows (numbering according to the sequence of CONTIG-NAME_P1): a sequence starting from any of amino acid numbers 49−x to 49 (for example); and ending at any of amino acid numbers 50+((n−2)−x) (for example), in which x varies from 0 to n−2. In this example, it should also be read as including bridges in which n is any number of amino acids between 10-50 amino acids in length. Furthermore, the bridge polypeptide cannot extend beyond the sequence, so it should be read such that 49−x (for example) is not less than 1, nor 50+((n−2)−x) (for example) greater than the total sequence length.

[0341] In another embodiment, this invention provides isolated nucleic acid molecules, which in some embodiments encode for splice variants, having a nucleotide sequence as set forth in any one of the sequences listed herein, being homologous to such sequences, at a percent as described herein, or a sequence complementary thereto. In another embodiment, this invention provides an oligonucleotide of at least about 12 nucleotides, which specifically hybridizes with the nucleic acid molecules of this invention. In another embodiment, this invention provides vectors, cells, liposomes and compositions comprising the isolated nucleic acids or polypeptides of this invention, as appropriate.

[0342] In another embodiment, this invention provides a method for detecting the polypeptides of this invention in a biological sample, comprising: contacting a biological sample with an antibody specifically recognizing a splice variant according to the present invention under conditions whereby the antibody specifically interacts with the splice variant in the biological sample but do not recognize known corresponding proteins (wherein the known protein is discussed with regard to its splice variant(s) in the Examples below), and detecting said interaction; wherein the presence of an interaction correlates with the presence of a splice variant in the biological sample.

[0343] In another embodiment, this invention provides a method for detecting a polynucleotide of this invention in a biological sample, comprising: hybridizing the isolated nucleic acid molecules or oligonucleotide fragments of at least about a minimum length to a nucleic acid material of a biological sample and detecting a hybridization complex; wherein the presence of a hybridization complex correlates with the presence of a the polynucleotide in the biological sample.

[0344] In some embodiments of the present invention, the polypeptides/polynucleotides described herein are non-limiting examples of markers for diagnosing marker-detectable disease and/or an indicative condition. Each polypeptide/polynucleotide marker of the present invention can be used alone or in combination, for various uses, including but not limited to, prognosis, prediction, screening, early diagnosis, determination of progression, therapy selection and treatment monitoring of marker-detectable disease and/or an indicative condition, including a transition from an indicative condition to marker-detectable disease.

[0345] According to some embodiments of the present invention, any marker according to the present invention may optionally be used alone or combination. Such a combination may optionally comprise a plurality of markers described herein, optionally including any subcombination of markers, and/or a combination featuring at least one other marker, for example a known marker. Furthermore, such a combination may optionally and preferably be used as described above with regard to determining a ratio between a quantitative or semi-quantitative measurement of any marker described herein to any other marker described herein, and/or any other known marker, and/or any other marker. With regard to such a ratio between any marker described herein (or a combination thereof) and a known marker, more preferably the known marker comprises the “known protein” as described in greater detail below with regard to each cluster or gene.

[0346] In some embodiments of the present invention, there are provided of methods, uses, devices and assays for the diagnosis of a disease or condition. Optionally a plurality of biomarkers (or markers) may be used with the present invention. The plurality of markers may optionally include a plurality of markers described herein, and/or one or more known markers. The plurality of markers is preferably then correlated with the disease or condition. For example, such correlating may optionally comprise determining the concentration of each of the plurality of markers, and individually comparing each marker concentration to a threshold level. Optionally, if the marker concentration is above or below the threshold level (depending upon the marker and/or the diagnostic test being performed), the marker concentration correlates with the disease or condition. Optionally and preferably, a plurality of marker concentrations correlate with the disease or condition.

[0347] Alternatively, such correlating may optionally comprise determining the concentration of each of the plurality of markers, calculating a single index value based on the concentration of each of the plurality of markers, and comparing the index value to a threshold level.

[0348] Also alternatively, such correlating may optionally comprise determining a temporal change in at least one of the markers, and wherein the temporal change is used in the correlating step.

[0349] Also alternatively, such correlating may optionally comprise determining whether at least “X” number of the plurality of markers has a concentration outside of a predetermined range and/or above or below a threshold (as described above). The value of “X” may optionally be one marker, a plurality of markers or all of the markers; alternatively or additionally, rather than including any marker in the count for “X”, one or more specific markers of the plurality of markers may optionally be required to correlate with the disease or condition (according to a range and/or threshold).

[0350] Also alternatively, such correlating may optionally comprise determining whether a ratio of marker concentrations for two markers is outside a range and/or above or below a threshold. Optionally, if the ratio is above or below the threshold level and/or outside a range, the ratio correlates with the disease or condition.

[0351] Optionally, a combination of two or more these correlations may be used with a single panel and/or for correlating between a plurality of panels.

[0352] Optionally, the method distinguishes a disease or condition with a sensitivity of at least 70% at a specificity of at least 85% when compared to normal subjects. As used herein, sensitivity relates to the number of positive (diseased) samples detected out of the total number of positive samples present; specificity relates to the number of true negative (non-diseased) samples detected out of the total number of negative samples present. Preferably, the method distinguishes a disease or condition with a sensitivity of at least 80% at a specificity of at least 90% when compared to normal subjects. More preferably, the method distinguishes a disease or condition with a sensitivity of at least 90% at a specificity of at least 90% when compared to normal subjects. Also more preferably, the method distinguishes a disease or condition with a sensitivity of at least 70% at a specificity of at least 85% when compared to subjects exhibiting symptoms that mimic disease or condition symptoms.

[0353] A marker panel may be analyzed in a number of fashions well known to those of skill in the art. For example, each member of a panel may be compared to a “normal” value, or a value indicating a particular outcome. A particular diagnosis/prognosis may depend upon the comparison of each marker to this value; alternatively, if only a subset of markers are outside of a normal range, this subset may be indicative of a particular diagnosis/prognosis. The skilled artisan will also understand that diagnostic markers, differential diagnostic markers, prognostic markers, time of onset markers, disease or condition differentiating markers, etc., may be combined in a single assay or device. Markers may also be commonly used for multiple purposes by, for example, applying a different threshold or a different weighting factor to the marker for the different purpose(s).

[0354] In one embodiment, the panels comprise markers for the following purposes: diagnosis of a disease; diagnosis of disease and indication if the disease is in an acute phase and/or if an acute attack of the disease has occurred; diagnosis of disease and indication if the disease is in a non-acute phase and/or if a non-acute attack of the disease has occurred; indication whether a combination of acute and non-acute phases or attacks has occurred; diagnosis of a disease and prognosis of a subsequent adverse outcome; diagnosis of a disease and prognosis of a subsequent acute or non-acute phase or attack; disease progression (for example for cancer, such progression may include for example occurrence or recurrence of metastasis).

[0355] The above diagnoses may also optionally include differential diagnosis of the disease to distinguish it from other diseases, including those diseases that may feature one or more similar or identical symptoms.

[0356] In certain embodiments, one or more diagnostic or prognostic indicators are correlated to a condition or disease by merely the presence or absence of the indicator(s). In other embodiments, threshold level(s) of a diagnostic or prognostic indicator(s) can be established, and the level of the indicator(s) in a patient sample can simply be compared to the threshold level(s). The sensitivity and specificity of a diagnostic and/or prognostic test depends on more than just the analytical “quality” of the test—they also depend on the definition of what constitutes an abnormal result. In practice, Receiver Operating Characteristic curves, or “ROC” curves, are typically calculated by plotting the value of a variable versus its relative frequency in “normal” and “disease” populations, and/or by comparison of results from a subject before, during and/or after treatment. For any particular marker, a distribution of marker levels for subjects with and without a disease will likely overlap. Under such conditions, a test does not absolutely distinguish normal from disease with 100% accuracy, and the area of overlap indicates where the test cannot distinguish normal from disease. A threshold is selected, above which (or below which, depending on how a marker changes with the disease) the test is considered to be abnormal and below which the test is considered to be normal. The area under the ROC curve is a measure of the probability that the perceived measurement will allow correct identification of a condition.

[0357] The horizontal axis of the ROC curve represents (1-specificity), which increases with the rate of false positives. The vertical axis of the curve represents sensitivity, which increases with the rate of true positives. Thus, for a particular cutoff selected, the value of (1-specificity) may be determined, and a corresponding sensitivity may be obtained. The area under the ROC curve is a measure of the probability that the measured marker level will allow correct identification of a disease or condition. Thus, the area under the ROC curve can be used to determine the effectiveness of the test.

[0358] ROC curves can be used even when test results don't necessarily give an accurate number. As long as one can rank results, one can create an ROC curve. For example, results of a test on “disease” samples might be ranked according to degree (say 1=low, 2=normal, and 3=high). This ranking can be correlated to results in the “normal” population, and a ROC curve created. These methods are well known in the art (see for example Hanley et al., Radiology 143: 29-36 (1982), incorporated by reference as if fully set forth herein).

[0359] One or more markers may lack diagnostic or prognostic value when considered alone, but when used as part of a panel, such markers may be of great value in determining a particular diagnosis/prognosis. In some embodiments, particular thresholds for one or more markers in a panel are not relied upon to determine if a profile of marker levels obtained from a subject are indicative of a particular diagnosis/prognosis. Rather, the present invention may utilize an evaluation of the entire marker profile by plotting ROC curves for the sensitivity of a particular panel of markers versus 1-(specificity) for the panel at various cutoffs. In these methods, a profile of marker measurements from a subject is considered together to provide a global probability (expressed either as a numeric score or as a percentage risk) that an individual has had a disease, is at risk for developing such a disease, optionally the type of disease which the individual has had or is at risk for, and so forth etc. In such embodiments, an increase in a certain subset of markers may be sufficient to indicate a particular diagnosis/prognosis in one patient, while an increase in a different subset of markers may be sufficient to indicate the same or a different diagnosis/prognosis in another patient. Weighting factors may also be applied to one or more markers in a panel, for example, when a marker is of particularly high utility in identifying a particular diagnosis/prognosis, it may be weighted so that at a given level it alone is sufficient to signal a positive result. Likewise, a weighting factor may provide that no given level of a particular marker is sufficient to signal a positive result, but only signals a result when another marker also contributes to the analysis.

[0360] In some embodiments, markers and/or marker panels are selected to exhibit at least 70% sensitivity, more preferably at least 80% sensitivity, even more preferably at least 85% sensitivity, still more preferably at least 90% sensitivity, and most preferably at least 95% sensitivity, combined with at least 70% specificity, more preferably at least 80% specificity, even more preferably at least 85% specificity, still more preferably at least 90% specificity, and most preferably at least 95% specificity. In some embodiments, both the sensitivity and specificity are at least 75%, more preferably at least 80%, even more preferably at least 85%, still more preferably at least 90%, and most preferably at least 95%. Sensitivity and/or specificity may optionally be determined as described above, with regard to the construction of ROC graphs and so forth, for example.

[0361] According to some embodiments of the present invention, individual markers and/or combinations (panels) of markers may optionally be used for diagnosis of time of onset of a disease or condition. Such diagnosis may optionally be useful for a wide variety of conditions, preferably including those conditions with an abrupt onset.

[0362] The phrase “determining the prognosis” as used herein refers to methods by which the skilled artisan can predict the course or outcome of a condition in a patient. The term “prognosis” does not refer to the ability to predict the course or outcome of a condition with 100% accuracy, or even that a given course or outcome is more likely to occur than not. Instead, the skilled artisan will understand that the term “prognosis” refers to an increased probability that a certain course or outcome will occur; that is, that a course or outcome is more likely to occur in a patient exhibiting a given condition, when compared to those individuals not exhibiting the condition. For example, in individuals not exhibiting the condition, the chance of a given outcome may be about 3%. In some embodiments, a prognosis is about a 5% chance of a given outcome, about a 7% chance, about a 10% chance, about a 12% chance, about a 15% chance, about a 20% chance, about a 25% chance, about a 30% chance, about a 40% chance, about a 50% chance, about a 60% chance, about a 75% chance, about a 90% chance, and about a 95% chance. The term “about” in this context refers to +/−1%.

[0363] The skilled artisan will understand that associating a prognostic indicator with a predisposition to an adverse outcome is a statistical analysis. For example, a marker level of greater than 80 pg/mL may signal that a patient is more likely to suffer from an adverse outcome than patients with a level less than or equal to 80 pg/mL, as determined by a level of statistical significance. Additionally, a change in marker concentration from baseline levels may be reflective of patient prognosis, and the degree of change in marker level may be related to the severity of adverse events. Statistical significance is often determined by comparing two or more populations, and determining a confidence interval and/or a p value. See, e.g., Dowdy and Wearden, Statistics for Research, John Wiley & Sons, New York, 1983. In one embodiment the confidence intervals of the invention are 90%, 95%, 97.5%, 98%, 99%, 99.5%, 99.9% and 99.99%, while preferred p values are 0.1, 0.05, 0.025, 0.02, 0.01, 0.005, 0.001, and 0.0001. Exemplary statistical tests for associating a prognostic indicator with a predisposition to an adverse outcome are described hereinafter.

[0364] In other embodiments, a threshold degree of change in the level of a prognostic or diagnostic indicator can be established, and the degree of change in the level of the indicator in a patient sample can simply be compared to the threshold degree of change in the level. A preferred threshold change in the level for markers of the invention is about 5%, about 10%, about 15%, about 20%, about 25%, about 30%, about 50%, about 75%, about 100%, and about 150%. The term “about” in this context refers to +/−10%. In yet other embodiments, a “nomogram” can be established, by which a level of a prognostic or diagnostic indicator can be directly related to an associated disposition towards a given outcome. The skilled artisan is acquainted with the use of such nomograms to relate two numeric values with the understanding that the uncertainty in this measurement is the same as the uncertainty in the marker concentration because individual sample measurements are referenced, not population averages.

[0365] Exemplary, non-limiting methods and systems for identification of suitable biomarkers for marker panels are now described. Methods and systems for the identification of one or more markers for the diagnosis, and in particular for the differential diagnosis, of disease have been described previously. Suitable methods for identifying markers useful for the diagnosis of disease states are described in detail in U.S. patent application no. 2004-0126767, entitled METHOD AND SYSTEM FOR DISEASE DETECTION USING MARKER COMBINATIONS, filed Dec. 27, 2002, hereby incorporated by reference in its entirety as if fully set forth herein. One skilled in the art will also recognize that univariate analysis of markers can be performed and the data from the univariate analyses of multiple markers can be combined to form panels of markers to differentiate different disease conditions.

[0366] In developing a panel of markers useful in diagnosis, data for a number of potential markers may be obtained from a group of subjects by testing for the presence or level of certain markers. The group of subjects is divided into two sets, and preferably the first set and the second set each have an approximately equal number of subjects. The first set includes subjects who have been confirmed as having a disease or, more generally, being in a first condition state. For example, this first set of patients may be those that have recently had a disease and/or a particular type of the disease. The confirmation of this condition state may be made through more rigorous and/or expensive testing, preferably according to a previously defined diagnostic standard. Hereinafter, subjects in this first set will be referred to as “diseased”.

[0367] The second set of subjects are simply those who do not fall within the first set. Subjects in this second set may be “non-diseased;” that is, normal subjects. Alternatively, subjects in this second set may be selected to exhibit one symptom or a constellation of symptoms that mimic those symptoms exhibited by the “diseased” subjects.

[0368] The data obtained from subjects in these sets includes levels of a plurality of markers. Preferably, data for the same set of markers is available for each patient. This set of markers may include all candidate markers which may be suspected as being relevant to the detection of a particular disease or condition. Actual known relevance is not required. Embodiments of the methods and systems described herein may be used to determine which of the candidate markers are most relevant to the diagnosis of the disease or condition. The levels of each marker in the two sets of subjects may be distributed across a broad range, e.g., as a Gaussian distribution. However, no distribution fit is required.

[0369] As noted above, a marker often is incapable of definitively identifying a patient as either diseased or non-diseased. For example, if a patient is measured as having a marker level that falls within the overlapping region, the results of the test will be useless in diagnosing the patient. An artificial cutoff may be used to distinguish between a positive and a negative test result for the detection of the disease or condition. Regardless of where the cutoff is selected, the effectiveness of the single marker as a diagnosis tool is unaffected. Changing the cutoff merely trades off between the number of false positives and the number of false negatives resulting from the use of the single marker. The effectiveness of a test having such an overlap is often expressed using a ROC (Receiver Operating Characteristic) curve as described above.

[0370] As discussed above, the measurement of the level of a single marker may have limited usefulness. The measurement of additional markers provides additional information, but the difficulty lies in properly combining the levels of two potentially unrelated measurements. In the methods and systems according to embodiments of the present invention, data relating to levels of various markers for the sets of diseased and non-diseased patients may be used to develop a panel of markers to provide a useful panel response. The data may be provided in a database such as Microsoft Access, Oracle, other SQL databases or simply in a data file. The database or data file may contain, for example, a patient identifier such as a name or number, the levels of the various markers present, and whether the patient is diseased or non-diseased.

[0371] Next, an artificial cutoff region may be initially selected for each marker. The location of the cutoff region may initially be selected at any point, but the selection may affect the optimization process described below. In this regard, selection near a suspected optimal location may facilitate faster convergence of the optimizer. In an embodiment method, the cutoff region is initially centered about the center of the overlap region of the two sets of patients. In one embodiment, the cutoff region may simply be a cutoff point. In other embodiments, the cutoff region may have a length of greater than zero. In this regard, the cutoff region may be defined by a center value and a magnitude of length. In practice, the initial selection of the limits of the cutoff region may be determined according to a pre-selected percentile of each set of subjects. For example, a point above which a pre-selected percentile of diseased patients are measured may be used as the right (upper) end of the cutoff range.

[0372] Each marker value for each patient may then be mapped to an indicator. The indicator is assigned one value below the cutoff region and another value above the cutoff region. For example, if a marker generally has a lower value for non-diseased patients and a higher value for diseased patients, a zero indicator will be assigned to a low value for a particular marker, indicating a potentially low likelihood of a positive diagnosis. In other embodiments, the indicator may be calculated based on a polynomial. The coefficients of the polynomial may be determined based on the distributions of the marker values among the diseased and non-diseased subjects.

[0373] The relative importance of the various markers may be indicated by a weighting factor. The weighting factor may initially be assigned as a coefficient for each marker. As with the cutoff region, the initial selection of the weighting factor may be selected at any acceptable value, but the selection may affect the optimization process. In this regard, selection near a suspected optimal location may facilitate faster convergence of the optimizer. In an embodiment method, acceptable weighting coefficients may range between zero and one, and an initial weighting coefficient for each marker may be assigned as 0.5. In one embodiment, the initial weighting coefficient for each marker may be associated with the effectiveness of that marker by itself. For example, a ROC curve may be generated for the single marker, and the area under the ROC curve may be used as the initial weighting coefficient for that marker.

[0374] Next, a panel response may be calculated for each subject in each of the two sets. The panel response is a function of the indicators to which each marker level is mapped and the weighting coefficients for each marker. One advantage of using an indicator value rather than the marker value is that an extraordinarily high or low marker levels do not change the probability of a diagnosis of diseased or non-diseased for that particular marker. Typically, a marker value above a certain level generally indicates a certain condition state. Marker values above that level indicate the condition state with the same certainty. Thus, an extraordinarily high marker value may not indicate an extraordinarily high probability of that condition state. The use of an indicator which is constant on one side of the cutoff region eliminates this concern.

[0375] The panel response may also be a general function of several parameters including the marker levels and other factors including, for example, race and gender of the patient. Other factors contributing to the panel response may include the slope of the value of a particular marker over time. For example, a patient may be measured when first arriving at the hospital for a particular marker. The same marker may be measured again an hour later, and the level of change may be reflected in the panel response. Further, additional markers may be derived from other markers and may contribute to the value of the panel response. For example, the ratio of values of two markers may be a factor in calculating the panel response.

[0376] Having obtained panel responses for each subject in each set of subjects, the distribution of the panel responses for each set may now be analyzed. An objective function may be defined to facilitate the selection of an effective panel. The objective function should generally be indicative of the effectiveness of the panel, as may be expressed by, for example, overlap of the panel responses of the diseased set of subjects and the panel responses of the non-diseased set of subjects. In this manner, the objective function may be optimized to maximize the effectiveness of the panel by, for example, minimizing the overlap.

[0377] In a some embodiment, the ROC curve representing the panel responses of the two sets of subjects may be used to define the objective function. For example, the objective function may reflect the area under the ROC curve. By maximizing the area under the curve, one may maximize the effectiveness of the panel of markers. In other embodiments, other features of the ROC curve may be used to define the objective function. For example, the point at which the slope of the ROC curve is equal to one may be a useful feature. In other embodiments, the point at which the product of sensitivity and specificity is a maximum, sometimes referred to as the “knee,” may be used. In an embodiment, the sensitivity at the knee may be maximized. In further embodiments, the sensitivity at a predetermined specificity level may be used to define the objective function. Other embodiments may use the specificity at a predetermined sensitivity level may be used. In still other embodiments, combinations of two or more of these ROC-curve features may be used.

[0378] It is possible that one of the markers in the panel is specific to the disease or condition being diagnosed. When such markers are present at above or below a certain threshold, the panel response may be set to return a “positive” test result. When the threshold is not satisfied, however, the levels of the marker may nevertheless be used as possible contributors to the objective function.

[0379] An optimization algorithm may be used to maximize or minimize the objective function. Optimization algorithms are well-known to those skilled in the art and include several commonly available minimizing or maximizing functions including the Simplex method and other constrained optimization techniques. It is understood by those skilled in the art that some minimization functions are better than others at searching for global minimums, rather than local minimums. In the optimization process, the location and size of the cutoff region for each marker may be allowed to vary to provide at least two degrees of freedom per marker. Such variable parameters are referred to herein as independent variables. In one embodiment, the weighting coefficient for each marker is also allowed to vary across iterations of the optimization algorithm. In various embodiments, any permutation of these parameters may be used as independent variables.

[0380] In addition to the above-described parameters, the sense of each marker may also be used as an independent variable. For example, in many cases, it may not be known whether a higher level for a certain marker is generally indicative of a diseased state or a non-diseased state. In such a case, it may be useful to allow the optimization process to search on both sides. In practice, this may be implemented in several ways. For example, in one embodiment, the sense may be a truly separate independent variable which may be flipped between positive and negative by the optimization process. Alternatively, the sense may be implemented by allowing the weighting coefficient to be negative.

[0381] The optimization algorithm may be provided with certain constraints as well. For example, the resulting ROC curve may be constrained to provide an area-under-curve of greater than a particular value. ROC curves having an area under the curve of 0.5 indicate complete randomness, while an area under the curve of 1.0 reflects perfect separation of the two sets. Thus, a minimum acceptable value, such as 0.75, may be used as a constraint, particularly if the objective function does not incorporate the area under the curve. Other constraints may include limitations on the weighting coefficients of particular markers. Additional constraints may limit the sum of all the weighting coefficients to a particular value, such as 1.0.

[0382] The iterations of the optimization algorithm generally vary the independent parameters to satisfy the constraints while minimizing or maximizing the objective function. The number of iterations may be limited in the optimization process. Further, the optimization process may be terminated when the difference in the objective function between two consecutive iterations is below a predetermined threshold, thereby indicating that the optimization algorithm has reached a region of a local minimum or a maximum.

[0383] Thus, the optimization process may provide a panel of markers including weighting coefficients for each marker and cutoff regions for the mapping of marker values to indicators. In order to develop lower-cost panels which require the measurement of fewer marker levels, certain markers may be eliminated from the panel. In this regard, the effective contribution of each marker in the panel may be determined to identify the relative importance of the markers. In one embodiment, the weighting coefficients resulting from the optimization process may be used to determine the relative importance of each marker. The markers with the lowest coefficients may be eliminated.

[0384] Individual panel response values may also be used as markers in the methods described herein. For example, a panel may be constructed from a plurality of markers, and each marker of the panel may be described by a function and a weighting factor to be applied to that marker (as determined by the methods described above). Each individual marker level is determined for a sample to be tested, and that level is applied to the predetermined function and weighting factor for that particular marker to arrive at a sample value for that marker. The sample values for each marker are added together to arrive at the panel response for that particular sample to be tested. For a “diseased” and “non-diseased” group of patients, the resulting panel responses may be treated as if they were just levels of another disease marker.

[0385] Measures of test accuracy may be obtained as described in Fischer et al., Intensive Care Med. 29: 1043-51, 2003 (hereby incorporated by reference as if fully set forth herein), and used to determine the effectiveness of a given marker or panel of markers. These measures include sensitivity and specificity, predictive values, likelihood ratios, diagnostic odds ratios, and ROC curve areas. As discussed above, suitable tests may exhibit one or more of the following results on these various measures: at least 75% sensitivity, combined with at least 75% specificity; ROC curve area of at least 0.7, more preferably at least 0.8, even more preferably at least 0.9, and most preferably at least 0.95; and/or a positive likelihood ratio (calculated as sensitivity/(1-specificity)) of at least 5, more preferably at least 10, and most preferably at least 20, and a negative likelihood ratio (calculated as (1-sensitivity)/specificity) of less than or equal to 0.3, more preferably less than or equal to 0.2, and most preferably less than or equal to 0.1.

[0386] According to embodiments of the present invention, a splice variant protein or a fragment thereof, or a splice variant nucleic acid sequence or a fragment thereof, may be featured as a biomarker for detecting marker-detectable disease and/or an indicative condition, such that a biomarker may optionally comprise any of the above.

[0387] According to still other embodiments, the present invention optionally and preferably encompasses any amino acid sequence or fragment thereof encoded by a nucleic acid sequence corresponding to a splice variant protein as described herein. Any oligopeptide or peptide relating to such an amino acid sequence or fragment thereof may optionally also (additionally or alternatively) be used as a biomarker, including but not limited to the unique amino acid sequences of these proteins that are depicted as tails, heads, insertions, edges or bridges. The present invention also optionally encompasses antibodies capable of recognizing, and/or being elicited by, such oligopeptides or peptides.

[0388] The present invention also optionally and preferably encompasses any nucleic acid sequence or fragment thereof, or amino acid sequence or fragment thereof, corresponding to a splice variant of the present invention as described above, optionally for any application.

[0389] Non-limiting examples of methods or assays are described below.

[0390] The present invention also relates to kits based upon such diagnostic methods or assays.

### Nucleic Acid Sequences and Oligonucleotides

[0391] Various embodiments of the present invention encompass nucleic acid sequences described hereinabove; fragments thereof, sequences hybridizable therewith, sequences homologous thereto, sequences encoding similar polypeptides with different codon usage, altered sequences characterized by mutations, such as deletion, insertion or substitution of one or more nucleotides, either naturally occurring or artificially induced, either randomly or in a targeted fashion.

[0392] The present invention encompasses nucleic acid sequences described herein; fragments thereof, sequences hybridizable therewith, sequences homologous thereto [e.g., at least 50%, at least 55%, at least 60%, at least 65%, at least 70%, at least 75%, at least 80%, at least 85%, at least 95% or more say 100% identical to the nucleic acid sequences set forth below], sequences encoding similar polypeptides with different codon usage, altered sequences characterized by mutations, such as deletion, insertion or substitution of one or more nucleotides, either naturally occurring or man induced, either randomly or in a targeted fashion. The present invention also encompasses homologous nucleic acid sequences (i.e., which form a part of a polynucleotide sequence of the present invention) which include sequence regions unique to the polynucleotides of the present invention.

[0393] In cases where the polynucleotide sequences of the present invention encode previously unidentified polypeptides, the present invention also encompasses novel polypeptides or portions thereof, which are encoded by the isolated polynucleotide and respective nucleic acid fragments thereof described hereinabove.

[0394] A “nucleic acid fragment” or an “oligonucleotide” or a “polynucleotide” are used herein interchangeably to refer to a polymer of nucleic acids. A polynucleotide sequence of the present invention refers to a single or double stranded nucleic acid sequences which is isolated and provided in the form of an RNA sequence, a complementary polynucleotide sequence (cDNA), a genomic polynucleotide sequence and/or a composite polynucleotide sequences (e.g., a combination of the above).

[0395] As used herein the phrase “complementary polynucleotide sequence” refers to a sequence, which results from reverse transcription of messenger RNA using a reverse transcriptase or any other RNA dependent DNA polymerase. Such a sequence can be subsequently amplified in vivo or in vitro using a DNA dependent DNA polymerase.

[0396] As used herein the phrase “genomic polynucleotide sequence” refers to a sequence derived (isolated) from a chromosome and thus it represents a contiguous portion of a chromosome.

[0397] As used herein the phrase “composite polynucleotide sequence” refers to a sequence, which is composed of genomic and cDNA sequences. A composite sequence can include some exonal sequences required to encode a polypeptide, as well as some intronic sequences interposing therebetween. The intronic sequences can be of any source, including of other genes, and typically will include conserved splicing signal sequences. Such intronic sequences may further include cis acting expression regulatory elements.

[0398] Preferred embodiments of the present invention encompass oligonucleotide probes.

[0399] An example of an oligonucleotide probe which can be utilized by the present invention is a single stranded polynucleotide which includes a sequence complementary to the unique sequence region of any variant according to the present invention, including but not limited to a nucleotide sequence coding for an amino sequence of a bridge, tail, head and/or insertion according to the present invention, and/or the equivalent portions of any nucleotide sequence given herein (including but not limited to a nucleotide sequence of a node, segment or amplicon described herein).

[0400] Alternatively, an oligonucleotide probe of the present invention can be designed to hybridize with a nucleic acid sequence encompassed by any of the above nucleic acid sequences, particularly the portions specified above, including but not limited to a nucleotide sequence coding for an amino sequence of a bridge, tail, head and/or insertion according to the present invention, and/or the equivalent portions of any nucleotide sequence given herein (including but not limited to a nucleotide sequence of a node, segment or amplicon described herein).

[0401] Oligonucleotides designed according to the teachings of the present invention can be generated according to any oligonucleotide synthesis method known in the art such as enzymatic synthesis or solid phase synthesis. Equipment and reagents for executing solid-phase synthesis are commercially available from, for example, Applied Biosystems. Any other means for such synthesis may also be employed; the actual synthesis of the oligonucleotides is well within the capabilities of one skilled in the art and can be accomplished via established methodologies as detailed in, for example, “Molecular Cloning: A laboratory Manual” Sambrook et al., (1989); “Current Protocols in Molecular Biology” Volumes I-III Ausubel, R. M., ed. (1994); Ausubel et al., “Current Protocols in Molecular Biology”, John Wiley and Sons, Baltimore, Md. (1989); Perbal, “A Practical Guide to Molecular Cloning”, John Wiley & Sons, New York (1988) and “Oligonucleotide Synthesis” Gait, M. J., ed. (1984) utilizing solid phase chemistry, e.g. cyanoethyl phosphoramidite followed by deprotection, desalting and purification by for example, an automated trityl-on method or HPLC.

[0402] Oligonucleotides used according to this aspect of the present invention are those having a length selected from a range of about 10 to about 200 bases preferably about 15 to about 150 bases, more preferably about 20 to about 100 bases, most preferably about 20 to about 50 bases. Preferably, the oligonucleotide of the present invention features at least 17, at least 18, at least 19, at least 20, at least 22, at least 25, at least 30 or at least 40, bases specifically hybridizable with the biomarkers of the present invention.

[0403] The oligonucleotides of the present invention may comprise heterocylic nucleosides consisting of purines and the pyrimidines bases, bonded in a 3′ to 5′ phosphodiester linkage.

[0404] Preferably used oligonucleotides are those modified at one or more of the backbone, internucleoside linkages or bases, as is broadly described hereinunder.

[0405] Specific examples of preferred oligonucleotides useful according to this aspect of the present invention include oligonucleotides containing modified backbones or non-natural internucleoside linkages. Oligonucleotides having modified backbones include those that retain a phosphorus atom in the backbone, as disclosed in U.S. Pat. Nos. 4,469,863; 4,476,301; 5,023,243; 5,177,196; 5,188,897; 5,264,423; 5,276,019; 5,278,302; 5,286,717; 5,321,131; 5,399,676; 5,405,939; 5,453,496; 5,455,233; 5,466,677; 5,476,925; 5,519,126; 5,536,821; 5,541,306; 5,550,111; 5,563,253; 5,571,799; 5,587,361; and 5,625,050.

[0406] Preferred modified oligonucleotide backbones include, for example, phosphorothioates, chiral phosphorothioates, phosphorodithioates, phosphotriesters, aminoalkyl phosphotriesters, methyl and other alkyl phosphonates including 3′-alkylene phosphonates and chiral phosphonates, phosphinates, phosphoramidates including 3′-amino phosphoramidate and aminoalkylphosphoramidates, thionophosphoramidates, thionoalkylphosphonates, thionoalkylphosphotriesters, and boranophosphates having normal 3′-5′ linkages, 2′-5′ linked analogs of these, and those having inverted polarity wherein the adjacent pairs of nucleoside units are linked 3′-5′ to 5′-3′ or 2′-5′ to 5′-2′. Various salts, mixed salts and free acid forms can also be used.

[0407] Alternatively, modified oligonucleotide backbones that do not include a phosphorus atom therein have backbones that are formed by short chain alkyl or cycloalkyl internucleoside linkages, mixed heteroatom and alkyl or cycloalkyl internucleoside linkages, or one or more short chain heteroatomic or heterocyclic internucleoside linkages. These include those having morpholino linkages (formed in part from the sugar portion of a nucleoside); siloxane backbones; sulfide, sulfoxide and sulfone backbones; formacetyl and thioformacetyl backbones; methylene formacetyl and thioformacetyl backbones; alkene containing backbones; sulfamate backbones; methyleneimino and methylenehydrazino backbones; sulfonate and sulfonamide backbones; amide backbones; and others having mixed N, O, S and CH₂ component parts, as disclosed in U.S. Pat. Nos. 5,034,506; 5,166,315; 5,185,444; 5,214,134; 5,216,141; 5,235,033; 5,264,562; 5,264,564; 5,405,938; 5,434,257; 5,466,677; 5,470,967; 5,489,677; 5,541,307; 5,561,225; 5,596,086; 5,602,240; 5,610,289; 5,602,240; 5,608,046; 5,610,289; 5,618,704; 5,623,070; 5,663,312; 5,633,360; 5,677,437; and 5,677,439.

[0408] Other oligonucleotides which can be used according to the present invention, are those modified in both sugar and the internucleoside linkage, i.e., the backbone, of the nucleotide units are replaced with novel groups. The base units are maintained for complementation with the appropriate polynucleotide target. An example for such an oligonucleotide mimetic, includes peptide nucleic acid (PNA). United States patents that teach the preparation of PNA compounds include, but are not limited to, U.S. Pat. Nos. 5,539,082; 5,714,331; and 5,719,262, each of which is herein incorporated by reference. Other backbone modifications, which can be used in the present invention are disclosed in U.S. Pat. No. 6,303,374.

[0409] Oligonucleotides of the present invention may also include base modifications or substitutions. As used herein, “unmodified” or “natural” bases include the purine bases adenine (A) and guanine (G), and the pyrimidine bases thymine (T), cytosine (C) and uracil (U). Modified bases include but are not limited to other synthetic and natural bases such as 5-methylcytosine (5-me-C), 5-hydroxymethyl cytosine, xanthine, hypoxanthine, 2-aminoadenine, 6-methyl and other alkyl derivatives of adenine and guanine, 2-propyl and other alkyl derivatives of adenine and guanine, 2-thiouracil, 2-thiothymine and 2-thiocytosine, 5-halouracil and cytosine, 5-propynyl uracil and cytosine, 6-azo uracil, cytosine and thymine, 5-uracil (pseudouracil), 4-thiouracil, 8-halo, 8-amino, 8-thiol, 8-thioalkyl, 8-hydroxyl and other 8-substituted adenines and guanines, 5-halo particularly 5-bromo, 5-trifluoromethyl and other 5-substituted uracils and cytosines, 7-methylguanine and 7-methyladenine, 8-azaguanine and 8-azaadenine, 7-deazaguanine and 7-deazaadenine and 3-deazaguanine and 3-deazaadenine. Further bases particularly useful for increasing the binding affinity of the oligomeric compounds of the invention include 5-substituted pyrimidines, 6-azapyrimidines and N2, N-6 and O-6 substituted purines, including 2-aminopropyladenine, 5-propynyluracil and 5-propynylcytosine. 5-methylcytosine substitutions have been shown to increase nucleic acid duplex stability by 0.6-1.2° C. and are presently preferred base substitutions, even more particularly when combined with 2′-O-methoxyethyl sugar modifications.

[0410] Another modification of the oligonucleotides of the invention involves chemically linking to the oligonucleotide one or more moieties or conjugates, which enhance the activity, cellular distribution or cellular uptake of the oligonucleotide. Such moieties include but are not limited to lipid moieties such as a cholesterol moiety, cholic acid, a thioether, e.g., hexyl-5-tritylthiol, a thiocholesterol, an aliphatic chain, e.g., dodecandiol or undecyl residues, a phospholipid, e.g., di-hexadecyl-rac-glycerol or triethylammonium 1,2-di-O-hexadecyl-rac-glycero-3-H-phosphonate, a polyamine or a polyethylene glycol chain, or adamantane acetic acid, a palmityl moiety, or an octadecylamine or hexylamino-carbonyl-oxycholesterol moiety, as disclosed in U.S. Pat. No. 6,303,374.

[0411] It is not necessary for all positions in a given oligonucleotide molecule to be uniformly modified, and in fact more than one of the aforementioned modifications may be incorporated in a single compound or even at a single nucleoside within an oligonucleotide.

[0412] It will be appreciated that oligonucleotides of the present invention may include further modifications for more efficient use as diagnostic agents and/or to increase bioavailability, therapeutic efficacy and reduce cytotoxicity.

[0413] To enable cellular expression of the polynucleotides of the present invention, a nucleic acid construct according to the present invention may be used, which includes at least a coding region of one of the above nucleic acid sequences, and further includes at least one cis acting regulatory element. As used herein, the phrase “cis acting regulatory element” refers to a polynucleotide sequence, preferably a promoter, which binds a trans acting regulator and regulates the transcription of a coding sequence located downstream thereto.

[0414] Any suitable promoter sequence can be used by the nucleic acid construct of the present invention.

[0415] Preferably, the promoter utilized by the nucleic acid construct of the present invention is active in the specific cell population transformed. Examples of cell type-specific and/or tissue-specific promoters include promoters such as albumin that is liver specific, lymphoid specific promoters [Calame et al., (1988) Adv. Immunol. 43:235-275]; in particular promoters of T-cell receptors [Winoto et al., (1989) EMBO J. 8:729-733] and immunoglobulins; [Banerji et al. (1983) Cell 33729-740], neuron-specific promoters such as the neurofilament promoter [Byrne et al. (1989) Proc. Natl. Acad. Sci. USA 86:5473-5477], pancreas-specific promoters [Edlunch et al. (1985) Science 230:912-916] or mammary gland-specific promoters such as the milk whey promoter (U.S. Pat. No. 4,873,316 and European Application Publication No. 264,166). The nucleic acid construct of the present invention can further include an enhancer, which can be adjacent or distant to the promoter sequence and can function in up regulating the transcription therefrom.

[0416] The nucleic acid construct of the present invention preferably further includes an appropriate selectable marker and/or an origin of replication. Preferably, the nucleic acid construct utilized is a shuttle vector, which can propagate both in E. coli (wherein the construct comprises an appropriate selectable marker and origin of replication) and be compatible for propagation in cells, or integration in a gene and a tissue of choice. The construct according to the present invention can be, for example, a plasmid, a bacmid, a phagemid, a cosmid, a phage, a virus or an artificial chromosome.

[0417] Examples of suitable constructs include, but are not limited to, pcDNA3, pcDNA3.1 (+/−), pGL3, PzeoSV2 (+/−), pDisplay, pEF/myc/cyto, pCMV/myc/cyto each of which is commercially available from Invitrogen Co. (www.invitrogen.com). Examples of retroviral vector and packaging systems are those sold by Clontech, San Diego, Calif., including Retro-X vectors pLNCX and pLXSN, which permit cloning into multiple cloning sites and the transgene is transcribed from CMV promoter. Vectors derived from Mo-MuLV are also included such as pBabe, where the transgene will be transcribed from the 5′LTR promoter.

[0418] Currently preferred in vivo nucleic acid transfer techniques include transfection with viral or non-viral constructs, such as adenovirus, lentivirus, Herpes simplex I virus, or adeno-associated virus (AAV) and lipid-based systems. Useful lipids for lipid-mediated transfer of the gene are, for example, DOTMA, DOPE, and DC-Chol [Tonkinson et al., Cancer Investigation, 14(1): 54-65 (1996)]. The most preferred constructs for use in gene therapy are viruses, most preferably adenoviruses, AAV, lentiviruses, or retroviruses. A viral construct such as a retroviral construct includes at least one transcriptional promoter/enhancer or locus-defining element(s), or other elements that control gene expression by other means such as alternate splicing, nuclear RNA export, or post-translational modification of messenger. Such vector constructs also include a packaging signal, long terminal repeats (LTRs) or portions thereof, and positive and negative strand primer binding sites appropriate to the virus used, unless it is already present in the viral construct. In addition, such a construct typically includes a signal sequence for secretion of the peptide from a host cell in which it is placed. Preferably the signal sequence for this purpose is a mammalian signal sequence or the signal sequence of the polypeptide variants of the present invention. Optionally, the construct may also include a signal that directs polyadenylation, as well as one or more restriction sites and a translation termination sequence. By way of example, such constructs will typically include a 5′ LTR, a tRNA binding site, a packaging signal, an origin of second-strand DNA synthesis, and a 3′ LTR or a portion thereof. Other vectors can be used that are non-viral, such as cationic lipids, polylysine, and dendrimers.

[0419] Variant Recombinant Expression Vectors and Host Cells

[0420] Another aspect of the invention pertains to vectors, preferably expression vectors, containing a nucleic acid encoding a variant protein, or derivatives, fragments, analogs or homologs thereof. As used herein, the term “vector” refers to a nucleic acid molecule capable of transporting another nucleic acid to which it has been linked. One type of vector is a “plasmid”, which refers to a circular double stranded DNA loop into which additional DNA segments can be ligated. Another type of vector is a viral vector, wherein additional DNA segments can be ligated into the viral genome. Certain vectors are capable of autonomous replication in a host cell into which they are introduced (e.g., bacterial vectors having a bacterial origin of replication and episomal mammalian vectors). Other vectors (e.g., non-episomal mammalian vectors) are integrated into the genome of a host cell upon introduction into the host cell, and thereby are replicated along with the host genome. Moreover, certain vectors are capable of directing the expression of genes to which they are operatively-linked. Such vectors are referred to herein as “expression vectors”. In general, expression vectors of utility in recombinant DNA techniques are often in the form of plasmids. In the present specification, “plasmid” and “vector” can be used interchangeably as the plasmid is the most commonly used form of vector. However, the invention is intended to include such other forms of expression vectors, such as viral vectors (e.g., replication defective retroviruses, adenoviruses and adeno-associated viruses), which serve equivalent functions.

[0421] The recombinant expression vectors of the invention comprise a nucleic acid of the invention in a form suitable for expression of the nucleic acid in a host cell, which means that the recombinant expression vectors include one or more regulatory sequences, selected on the basis of the host cells to be used for expression, that is operatively-linked to the nucleic acid sequence to be expressed. Within a recombinant expression vector, “operably-linked” is intended to mean that the nucleotide sequence of interest is linked to the regulatory sequence(s) in a manner that allows for expression of the nucleotide sequence (e.g., in an in vitro transcription/translation system or in a host cell when the vector is introduced into the host cell).

[0422] The term “regulatory sequence” is intended to include promoters, enhancers and other expression control elements (e.g., polyadenylation signals). Such regulatory sequences are described, for example, in Goeddel, Gene Expression Technology Methods in Enzymology 185, Academic Press, San Diego, Calif. (1990). Regulatory sequences include those that direct constitutive expression of a nucleotide sequence in many types of host cell and those that direct expression of the nucleotide sequence only in certain host cells (e.g., tissue-specific regulatory sequences). It will be appreciated by those skilled in the art that the design of the expression vector can depend on such factors as the choice of the host cell to be transformed, the level of expression of protein desired, etc. The expression vectors of the invention can be introduced into host cells to thereby produce proteins or peptides, including fusion proteins or peptides, encoded by nucleic acids as described herein (e.g., variant proteins, mutant forms of variant proteins, fusion proteins, etc.).

[0423] The recombinant expression vectors of the invention can be designed for production of variant proteins in prokaryotic or eukaryotic cells. For example, variant proteins can be expressed in bacterial cells such as Escherichia coli, insect cells (using baculovirus expression vectors) yeast cells or mammalian cells. Suitable host cells are discussed further in Goeddel, Gene Expression Technology: Methods in Enzymology 185, Academic Press, San Diego, Calif. (1990). Alternatively, the recombinant expression vector can be transcribed and translated in vitro, for example using T7 promoter regulatory sequences and T7 polymerase.

[0424] Expression of proteins in prokaryotes is most often carried out in Escherichia coli with vectors containing constitutive or inducible promoters directing the expression of either fusion or non-fusion proteins. Fusion vectors add a number of amino acids to a protein encoded therein, to the amino or carboxyl terminus of the recombinant protein. Such fusion vectors typically serve three purposes: (i) to increase expression of recombinant protein; (ii) to increase the solubility of the recombinant protein; and (iii) to aid in the purification of the recombinant protein by acting as a ligand in affinity purification. Often, in fusion expression vectors, a proteolytic cleavage site is introduced at the junction of the fusion moiety and the recombinant protein to enable separation of the recombinant protein from the fusion moiety subsequent to purification of the fusion protein. Such enzymes, and their cognate recognition sequences, include Factor Xa, thrombin, PreScission, TEV and enterokinase. Typical fusion expression vectors include pGEX (Pharmacia Biotech Inc; Smith and Johnson, 1988. Gene 67: 31-40), pMAL (New England Biolabs, Beverly, Mass.) and pRIT5 (Pharmacia, Piscataway, N.J.) and pTrcHis (Invitrogen Life Technologies) that fuse glutathione S-transferase (GST), maltose E binding protein, protein A or 6×His, respectively, to the target recombinant protein.

[0425] Examples of suitable inducible non-fusion E. coli expression vectors include pTrc (Amrann et al., (1988) Gene 69:301-315).

[0426] One strategy to maximize recombinant protein expression in E. coli is to express the protein in a host bacteria with an impaired capacity to proteolytically cleave the recombinant protein. See, e.g., Gottesman, Gene Expression Technology Methods in Enzymology 185, Academic Press, San Diego, Calif. (1990) 119-128. Another strategy is to alter the nucleic acid sequence of the nucleic acid to be inserted into an expression vector so that the individual codons for each amino acid are those preferentially utilized in E. coli (see, e.g., Wada, et al., 1992. Nucl. Acids Res. 20: 2111-2118). Such alteration of nucleic acid sequences of the invention can be carried out by standard DNA synthesis techniques. Another optional strategy to solve codon bias is by using BL21-codon plus bacterial strains (Invitrogen) or Rosetta bacterial strain (Novagen), as these strains contain extra copies of rare E. coli tRNA genes.

[0427] In another embodiment, the expression vector encoding for the variant protein is a yeast expression vector. Examples of vectors for expression in yeast Saccharomyces cerivisae include pYepSec1 (Baldari, et al., 1987. EMBO J. 6: 229-234), pMFa (Kujan and Herskowitz, 1982. Cell 30: 933-943), pJRY88 (Schultz et al., 1987. Gene 54: 113-123), pYES2 (Invitrogen Corporation, San Diego, Calif.), and picZ (InVitrogen Corp, San Diego, Calif.).

[0428] Alternatively, variant protein can be produced in insect cells using baculovirus expression vectors. Baculovirus vectors available for expression of proteins in cultured insect cells (e.g., SF9 cells) include the pAc series (Smith, et al., 1983. Mol. Cell. Biol. 3: 2156-2165) and the pVL series (Lucklow and Summers, 1989. Virology 170: 31-39).

[0429] In yet another embodiment, a nucleic acid of the invention is expressed in mammalian cells using a mammalian expression vector. Examples of mammalian expression vectors include pCDM8 (Seed, 1987. Nature 329: 840) and pMT2PC (Kaufman, et al., 1987. EMBO J. 6: 187-195), pIRESpuro (Clontech), pUB6 (Invitrogen), pCEP4 (Invitrogen) pREP4 (Invitrogen), pcDNA3 (Invitrogen). When used in mammalian cells, the expression vector's control functions are often provided by viral regulatory elements. For example, commonly used promoters are derived from polyoma, adenovirus 2, cytomegalovirus, Rous Sarcoma Virus, and simian virus 40. For other suitable expression systems for both prokaryotic and eukaryotic cells see, e.g., Chapters 16 and 17 of Sambrook, et al., Molecular Cloning: A Laboratory Manual. 2nd ed., Cold Spring Harbor Laboratory, Cold Spring Harbor Laboratory Press, Cold Spring Harbor, N.Y., 1989.

[0430] In another embodiment, the recombinant mammalian expression vector is capable of directing expression of the nucleic acid preferentially in a particular cell type (e.g., tissue-specific regulatory elements are used to express the nucleic acid). Tissue-specific regulatory elements are known in the art. Non-limiting examples of suitable tissue-specific promoters include the albumin promoter (liver-specific; Pinkert, et al., 1987. Genes Dev. 1: 268-277), lymphoid-specific promoters (Calame and Eaton, 1988. Adv. Immunol. 43: 235-275), in particular promoters of T cell receptors (Winoto and Baltimore, 1989. EMBO J. 8: 729-733) and immunoglobulins (Banerji, et al., 1983. Cell 33: 729-740; Queen and Baltimore, 1983. Cell 33: 741-748), neuron-specific promoters (e.g., the neurofilament promoter; Byrne and Ruddle, 1989. Proc. Natl. Acad. Sci. USA 86: 5473-5477), pancreas-specific promoters (Edlund, et al., 1985. Science 230: 912-916), and mammary gland-specific promoters (e.g., milk whey promoter; U.S. Pat. No. 4,873,316 and European Application Publication No. 264,166). Developmentally-regulated promoters are also encompassed, e.g., the murine hox promoters (Kessel and Gruss, 1990. Science 249: 374-379) and the □-fetoprotein promoter (Campes and Tilghman, 1989. Genes Dev. 3: 537-546).

[0431] The invention further provides a recombinant expression vector comprising a DNA molecule of the invention cloned into the expression vector in an antisense orientation. That is, the DNA molecule is operatively-linked to a regulatory sequence in a manner that allows for expression (by transcription of the DNA molecule) of an RNA molecule that is antisense to mRNA encoding for variant protein. Regulatory sequences operatively linked to a nucleic acid cloned in the antisense orientation can be chosen that direct the continuous expression of the antisense RNA molecule in a variety of cell types, for instance viral promoters and/or enhancers, or regulatory sequences can be chosen that direct constitutive, tissue specific or cell type specific expression of antisense RNA. The antisense expression vector can be in the form of a recombinant plasmid, phagemid or attenuated virus in which antisense nucleic acids are produced under the control of a high efficiency regulatory region, the activity of which can be determined by the cell type into which the vector is introduced. For a discussion of the regulation of gene expression using antisense genes see, e.g., Weintraub, et al., “Antisense RNA as a molecular tool for genetic analysis,” Reviews-Trends in Genetics, Vol. 1(1) 1986.

[0432] Another aspect of the invention pertains to host cells into which a recombinant expression vector of the invention has been introduced. The terms “host cell” and “recombinant host cell” are used interchangeably herein. It is understood that such terms refer not only to the particular subject cell but also to the progeny or potential progeny of such a cell. Because certain modifications may occur in succeeding generations due to either mutation or environmental influences, such progeny may not, in fact, be identical to the parent cell, but are still included within the scope of the term as used herein.

[0433] A host cell can be any prokaryotic or eukaryotic cell. For example, variant protein can be produced in bacterial cells such as E. coli, insect cells, yeast or mammalian cells (such as Chinese hamster ovary cells (CHO) or COS or 293 cells). Other suitable host cells are known to those skilled in the art.

[0434] Vector DNA can be introduced into prokaryotic or eukaryotic cells via conventional transformation or transfection techniques. As used herein, the terms “transformation” and “transfection” are intended to refer to a variety of art-recognized techniques for introducing foreign nucleic acid (e.g., DNA) into a host cell, including calcium phosphate or calcium chloride co-precipitation, DEAE-dextran-mediated transfection, lipofection, or electroporation. Suitable methods for transforming or transfecting host cells can be found in Sambrook, et al. (Molecular Cloning: A Laboratory Manual. 2nd ed., Cold Spring Harbor Laboratory, Cold Spring Harbor Laboratory Press, Cold Spring Harbor, N.Y., 1989), and other laboratory manuals.

[0435] For stable transfection of mammalian cells, it is known that, depending upon the expression vector and transfection technique used, only a small fraction of cells may integrate the foreign DNA into their genome. In order to identify and select these integrants, a gene that encodes a selectable marker (e.g., resistance to antibiotics) is generally introduced into the host cells along with the gene of interest. Various selectable markers include those that confer resistance to drugs, such as G418, hygromycin, puromycin, blasticidin and methotrexate. Nucleic acids encoding a selectable marker can be introduced into a host cell on the same vector as that encoding variant protein or can be introduced on a separate vector. Cells stably transfected with the introduced nucleic acid can be identified by drug selection (e.g., cells that have incorporated the selectable marker gene will survive, while the other cells die).

[0436] A host cell of the invention, such as a prokaryotic or eukaryotic host cell in culture, can be used to produce (i.e., express) variant protein. Accordingly, the invention further provides methods for producing variant protein using the host cells of the invention. In one embodiment, the method comprises culturing the host cell of the present invention (into which a recombinant expression vector encoding variant protein has been introduced) in a suitable medium such that variant protein is produced. In another embodiment, the method further comprises isolating variant protein from the medium or the host cell.

[0437] For efficient production of the protein, it is preferable to place the nucleotide sequences encoding the variant protein under the control of expression control sequences optimized for expression in a desired host. For example, the sequences may include optimized transcriptional and/or translational regulatory sequences (such as altered Kozak sequences).

### Hybridization Assays

[0438] Detection of a nucleic acid of interest in a biological sample may optionally be effected by hybridization-based assays using an oligonucleotide probe (non-limiting examples of probes according to the present invention were previously described).

[0439] Traditional hybridization assays include PCR, RT-PCR, Real-time PCR, RNase protection, in-situ hybridization, primer extension, Southern blots (DNA detection), dot or slot blots (DNA, RNA), and Northern blots (RNA detection) (NAT type assays are described in greater detail below). More recently, PNAs have been described (Nielsen et al. 1999, Current Opin. Biotechnol. 10:71-75). Other detection methods include kits containing probes on a dipstick setup and the like.

[0440] Hybridization based assays which allow the detection of a variant of interest (i.e., DNA or RNA) in a biological sample rely on the use of oligonucleotides which can be 10, 15, 20, or 30 to 100 nucleotides long preferably from 10 to 50, more preferably from 40 to 50 nucleotides long.

[0441] Thus, the isolated polynucleotides (oligonucleotides) of the present invention are preferably hybridizable with any of the herein described nucleic acid sequences under moderate to stringent hybridization conditions.

[0442] Moderate to stringent hybridization conditions are characterized by a hybridization solution such as containing 10% dextrane sulfate, 1 M NaCl, 1% SDS and 5×10⁶ cpm ³²P labeled probe, at 65° C., with a final wash solution of 0.2×SSC and 0.1% SDS and final wash at 65° C. and whereas moderate hybridization is effected using a hybridization solution containing 10% dextrane sulfate, 1 M NaCl, 1% SDS and 5×10⁶ cpm ³²P labeled probe, at 65° C., with a final wash solution of 1×SSC and 0.1% SDS and final wash at 50° C.

[0443] More generally, hybridization of short nucleic acids (below 200 bp in length, e.g. 17-40 bp in length) can be effected using the following exemplary hybridization protocols which can be modified according to the desired stringency; (i) hybridization solution of 6×SSC and 1% SDS or 3 M TMACI, 0.01 M sodium phosphate (pH 6.8), 1 mM EDTA (pH 7.6), 0.5% SDS, 100 μg/ml denatured salmon sperm DNA and 0.1% nonfat dried milk, hybridization temperature of 1-1.5° C. below the Tₘ, final wash solution of 3 M TMACI, 0.01 M sodium phosphate (pH 6.8), 1 mM EDTA (pH 7.6), 0.5% SDS at 1-1.5° C. below the Tₘ; (ii) hybridization solution of 6×SSC and 0.1% SDS or 3 M TMACI, 0.01 M sodium phosphate (pH 6.8), 1 mM EDTA (pH 7.6), 0.5% SDS, 100 μg/ml denatured salmon sperm DNA and 0.1% nonfat dried milk, hybridization temperature of 2-2.5° C. below the Tₘ, final wash solution of 3 M TMACI, 0.01 M sodium phosphate (pH 6.8), 1 mM EDTA (pH 7.6), 0.5% SDS at 1-1.5° C. below the Tₘ, final wash solution of 6×SSC, and final wash at 22° C.; (iii) hybridization solution of 6×SSC and 1% SDS or 3 M TMACI, 0.01 M sodium phosphate (pH 6.8), 1 mM EDTA (pH 7.6), 0.5% SDS, 100 μg/ml denatured salmon sperm DNA and 0.1% nonfat dried milk, hybridization temperature.

[0444] The detection of hybrid duplexes can be carried out by a number of methods. Typically, hybridization duplexes are separated from unhybridized nucleic acids and the labels bound to the duplexes are then detected. Such labels refer to radioactive, fluorescent, biological or enzymatic tags or labels of standard use in the art. A label can be conjugated to either the oligonucleotide probes or the nucleic acids derived from the biological sample.

[0445] Probes can be labeled according to numerous well known methods. Non-limiting examples of radioactive labels include 3H, 14C, 32P, and 35S, Non-limiting examples of detectable markers include ligands, fluorophores, chemiluminescent agents, enzymes, and antibodies. Other detectable markers for use with probes, which can enable an increase in sensitivity of the method of the invention, include biotin and radio-nucleotides. It will become evident to the person of ordinary skill that the choice of a particular label dictates the manner in which it is bound to the probe.

[0446] For example, oligonucleotides of the present invention can be labeled subsequent to synthesis, by incorporating biotinylated dNTPs or rNTP, or some similar means (e.g., photo-cross-linking a psoralen derivative of biotin to RNAs), followed by addition of labeled streptavidin (e.g., phycoerythrin-conjugated streptavidin) or the equivalent. Alternatively, when fluorescently-labeled oligonucleotide probes are used, fluorescein, lissamine, phycoerythrin, rhodamine (Perkin Elmer Cetus), Cy2, Cy3, Cy3.5, Cy5, Cy5.5, Cy7, Fluor X (Amersham) and others [e.g., Kricka et al. (1992), Academic Press San Diego, Calif] can be attached to the oligonucleotides.

[0447] Those skilled in the art will appreciate that wash steps may be employed to wash away excess target DNA or probe as well as unbound conjugate. Further, standard heterogeneous assay formats are suitable for detecting the hybrids using the labels present on the oligonucleotide primers and probes.

[0448] It will be appreciated that a variety of controls may be usefully employed to improve accuracy of hybridization assays. For instance, samples may be hybridized to an irrelevant probe and treated with RNAse A prior to hybridization, to assess false hybridization.

[0449] Although the present invention is not specifically dependent on the use of a label for the detection of a particular nucleic acid sequence, such a label might be beneficial, by increasing the sensitivity of the detection. Furthermore, it enables automation. Probes can be labeled according to numerous well known methods.

[0450] As commonly known, radioactive nucleotides can be incorporated into probes of the invention by several methods. Non-limiting examples of radioactive labels include ³H, ¹⁴C, ³²P, and ³⁵S.

[0451] Those skilled in the art will appreciate that wash steps may be employed to wash away excess target DNA or probe as well as unbound conjugate. Further, standard heterogeneous assay formats are suitable for detecting the hybrids using the labels present on the oligonucleotide primers and probes.

[0452] It will be appreciated that a variety of controls may be usefully employed to improve accuracy of hybridization assays.

[0453] Probes of the invention can be utilized with naturally occurring sugar-phosphate backbones as well as modified backbones including phosphorothioates, dithionates, alkyl phosphonates and a-nucleotides and the like. Probes of the invention can be constructed of either ribonucleic acid (RNA) or deoxyribonucleic acid (DNA), and preferably of DNA.

### NAT Assays

[0454] Detection of a nucleic acid of interest in a biological sample may also optionally be effected by NAT-based assays, which involve nucleic acid amplification technology, such as PCR for example (or variations thereof such as real-time PCR for example).

[0455] As used herein, a “primer” defines an oligonucleotide which is capable of annealing to (hybridizing with) a target sequence, thereby creating a double stranded region which can serve as an initiation point for DNA synthesis under suitable conditions.

[0456] Amplification of a selected, or target, nucleic acid sequence may be carried out by a number of suitable methods. See generally Kwoh et al., 1990, Am. Biotechnol. Lab. 8:14 Numerous amplification techniques have been described and can be readily adapted to suit particular needs of a person of ordinary skill. Non-limiting examples of amplification techniques include polymerase chain reaction (PCR), ligase chain reaction (LCR), strand displacement amplification (SDA), transcription-based amplification, the q3 replicase system and NASBA (Kwoh et al., 1989, Proc. Natl. Acad. Sci. USA 86, 1173-1177; Lizardi et al., 1988, BioTechnology 6:1197-1202; Malek et al., 1994, Methods Mol. Biol., 28:253-260; and Sambrook et al., 1989, supra).

[0457] The terminology “amplification pair” (or “primer pair”) refers herein to a pair of oligonucleotides (oligos) of the present invention, which are selected to be used together in amplifying a selected nucleic acid sequence by one of a number of types of amplification processes, preferably a polymerase chain reaction. Other types of amplification processes include ligase chain reaction, strand displacement amplification, or nucleic acid sequence-based amplification, as explained in greater detail below. As commonly known in the art, the oligos are designed to bind to a complementary sequence under selected conditions.

[0458] In one particular embodiment, amplification of a nucleic acid sample from a patient is amplified under conditions which favor the amplification of the most abundant differentially expressed nucleic acid. In one preferred embodiment, RT-PCR is carried out on an mRNA sample from a patient under conditions which favor the amplification of the most abundant mRNA. In another preferred embodiment, the amplification of the differentially expressed nucleic acids is carried out simultaneously. It will be realized by a person skilled in the art that such methods could be adapted for the detection of differentially expressed proteins instead of differentially expressed nucleic acid sequences.

[0459] The nucleic acid (i.e. DNA or RNA) for practicing the present invention may be obtained according to well known methods.

[0460] Oligonucleotide primers of the present invention may be of any suitable length, depending on the particular assay format and the particular needs and targeted genomes employed. Optionally, the oligonucleotide primers are at least 12 nucleotides in length, preferably between 15 and 24 molecules, and they may be adapted to be especially suited to a chosen nucleic acid amplification system. As commonly known in the art, the oligonucleotide primers can be designed by taking into consideration the melting point of hybridization thereof with its targeted sequence (Sambrook et al., 1989, Molecular Cloning—A Laboratory Manual, 2nd Edition, CSH Laboratories; Ausubel et al., 1989, in Current Protocols in Molecular Biology, John Wiley & Sons Inc., N.Y.).

[0461] It will be appreciated that antisense oligonucleotides may be employed to quantify expression of a splice isoform of interest. Such detection is effected at the pre-mRNA level. Essentially the ability to quantitate transcription from a splice site of interest can be effected based on splice site accessibility. Oligonucleotides may compete with splicing factors for the splice site sequences. Thus, low activity of the antisense oligonucleotide is indicative of splicing activity.

[0462] The polymerase chain reaction and other nucleic acid amplification reactions are well known in the art (various non-limiting examples of these reactions are described in greater detail below). The pair of oligonucleotides according to this aspect of the present invention are preferably selected to have compatible melting temperatures (Tm), e.g., melting temperatures which differ by less than that 7° C., preferably less than 5° C., more preferably less than 4° C., most preferably less than 3° C., ideally between 3° C. and 0° C.

[0463] Polymerase Chain Reaction (PCR): The polymerase chain reaction (PCR), as described in U.S. Pat. Nos. 4,683,195 and 4,683,202 to Mullis and Mullis et al., is a method of increasing the concentration of a segment of target sequence in a mixture of genomic DNA without cloning or purification. This technology provides one approach to the problems of low target sequence concentration. PCR can be used to directly increase the concentration of the target to an easily detectable level. This process for amplifying the target sequence involves the introduction of a molar excess of two oligonucleotide primers which are complementary to their respective strands of the double-stranded target sequence to the DNA mixture containing the desired target sequence. The mixture is denatured and then allowed to hybridize. Following hybridization, the primers are extended with polymerase so as to form complementary strands. The steps of denaturation, hybridization (annealing), and polymerase extension (elongation) can be repeated as often as needed, in order to obtain relatively high concentrations of a segment of the desired target sequence.

[0464] The length of the segment of the desired target sequence is determined by the relative positions of the primers with respect to each other, and, therefore, this length is a controllable parameter. Because the desired segments of the target sequence become the dominant sequences (in terms of concentration) in the mixture, they are said to be “PCR-amplified.”

[0465] Ligase Chain Reaction (LCR or LAR): The ligase chain reaction [LCR; sometimes referred to as “Ligase Amplification Reaction” (LAR)] has developed into a well-recognized alternative method of amplifying nucleic acids. In LCR, four oligonucleotides, two adjacent oligonucleotides which uniquely hybridize to one strand of target DNA, and a complementary set of adjacent oligonucleotides, which hybridize to the opposite strand are mixed and DNA ligase is added to the mixture. Provided that there is complete complementarity at the junction, ligase will covalently link each set of hybridized molecules. Importantly, in LCR, two probes are ligated together only when they base-pair with sequences in the target sample, without gaps or mismatches. Repeated cycles of denaturation, and ligation amplify a short segment of DNA. LCR has also been used in combination with PCR to achieve enhanced detection of single-base changes: see for example Segev, PCT Publication No. WO9001069 A1 (1990). However, because the four oligonucleotides used in this assay can pair to form two short ligatable fragments, there is the potential for the generation of target-independent background signal. The use of LCR for mutant screening is limited to the examination of specific nucleic acid positions.

[0466] Self-Sustained Synthetic Reaction (3SR/NASBA): The self-sustained sequence replication reaction (3SR) is a transcription-based in vitro amplification system that can exponentially amplify RNA sequences at a uniform temperature. The amplified RNA can then be utilized for mutation detection. In this method, an oligonucleotide primer is used to add a phage RNA polymerase promoter to the 5′ end of the sequence of interest. In a cocktail of enzymes and substrates that includes a second primer, reverse transcriptase, RNase H, RNA polymerase and ribo- and deoxyribonucleoside triphosphates, the target sequence undergoes repeated rounds of transcription, cDNA synthesis and second-strand synthesis to amplify the area of interest. The use of 3SR to detect mutations is kinetically limited to screening small segments of DNA (e.g., 200-300 base pairs).

[0467] Q-Beta (Qβ) Replicase: In this method, a probe which recognizes the sequence of interest is attached to the replicatable RNA template for Qβ replicase. A previously identified major problem with false positives resulting from the replication of unhybridized probes has been addressed through use of a sequence-specific ligation step. However, available thermostable DNA ligases are not effective on this RNA substrate, so the ligation must be performed by T4 DNA ligase at low temperatures (37 degrees C.). This prevents the use of high temperature as a means of achieving specificity as in the LCR, the ligation event can be used to detect a mutation at the junction site, but not elsewhere.

[0468] A successful diagnostic method must be very specific. A straight-forward method of controlling the specificity of nucleic acid hybridization is by controlling the temperature of the reaction. While the 3SR/NASBA, and Qβ systems are all able to generate a large quantity of signal, one or more of the enzymes involved in each cannot be used at high temperature (i.e., >55 degrees C.). Therefore the reaction temperatures cannot be raised to prevent non-specific hybridization of the probes. If probes are shortened in order to make them melt more easily at low temperatures, the likelihood of having more than one perfect match in a complex genome increases. For these reasons, PCR and LCR currently dominate the research field in detection technologies.

[0469] The basis of the amplification procedure in the PCR and LCR is the fact that the products of one cycle become usable templates in all subsequent cycles, consequently doubling the population with each cycle. The final yield of any such doubling system can be expressed as: (1+X)ⁿ=y, where “X” is the mean efficiency (percent copied in each cycle), “n” is the number of cycles, and “y” is the overall efficiency, or yield of the reaction. If every copy of a target DNA is utilized as a template in every cycle of a polymerase chain reaction, then the mean efficiency is 100%. If 20 cycles of PCR are performed, then the yield will be 2²⁰, or 1,048,576 copies of the starting material. If the reaction conditions reduce the mean efficiency to 85%, then the yield in those 20 cycles will be only 1.85²⁰, or 220,513 copies of the starting material. In other words, a PCR running at 85% efficiency will yield only 21% as much final product, compared to a reaction running at 100% efficiency. A reaction that is reduced to 50% mean efficiency will yield less than 1% of the possible product.

[0470] In practice, routine polymerase chain reactions rarely achieve the theoretical maximum yield, and PCRs are usually run for more than 20 cycles to compensate for the lower yield. At 50% mean efficiency, it would take 34 cycles to achieve the million-fold amplification theoretically possible in 20, and at lower efficiencies, the number of cycles required becomes prohibitive. In addition, any background products that amplify with a better mean efficiency than the intended target will become the dominant products.

[0471] Also, many variables can influence the mean efficiency of PCR, including target DNA length and secondary structure, primer length and design, primer and dNTP concentrations, and buffer composition, to name but a few. Contamination of the reaction with exogenous DNA (e.g., DNA spilled onto lab surfaces) or cross-contamination is also a major consideration. Reaction conditions must be carefully optimized for each different primer pair and target sequence, and the process can take days, even for an experienced investigator. The laboriousness of this process, including numerous technical considerations and other factors, presents a significant drawback to using PCR in the clinical setting. Indeed, PCR has yet to penetrate the clinical market in a significant way. The same concerns arise with LCR, as LCR must also be optimized to use different oligonucleotide sequences for each target sequence. In addition, both methods require expensive equipment, capable of precise temperature cycling.

[0472] Additional NAT tests are Fluorescense In Situ Hybridization (FISH) and Comparative Genomic Hybridization (CGH). Fluorescense In Situ Hybridization (FISH)—The test uses fluorescent single-stranded DNA probes which are complementary to the DNA sequences that are under examination (genes or chromosomes). These probes hybridize with the complementary DNA and allow the identification of the chromosomal location of genomic sequences of DNA.

[0473] Comparative Genomic Hybridization (CGH)—allows a comprehensive analysis of multiple DNA gains and losses in entire genomes. Genomic DNA from the tissue to be investigated and a reference DNA are differentially labeled and simultaneously hybridized in situ to normal metaphase chromosomes. Variations in signal intensities are indicative of differences in the genomic content of the tissue under investigation.

[0474] Many applications of nucleic acid detection technologies, such as in studies of allelic variation, involve not only detection of a specific sequence in a complex background, but also the discrimination between sequences with few, or single, nucleotide differences. One method of the detection of allele-specific variants by PCR is based upon the fact that it is difficult for Taq polymerase to synthesize a DNA strand when there is a mismatch between the template strand and the 3′ end of the primer. An allele-specific variant may be detected by the use of a primer that is perfectly matched with only one of the possible alleles; the mismatch to the other allele acts to prevent the extension of the primer, thereby preventing the amplification of that sequence. This method has a substantial limitation in that the base composition of the mismatch influences the ability to prevent extension across the mismatch, and certain mismatches do not prevent extension or have only a minimal effect.

[0475] A similar 3′-mismatch strategy is used with greater effect to prevent ligation in the LCR. Any mismatch effectively blocks the action of the thermostable ligase, but LCR still has the drawback of target-independent background ligation products initiating the amplification. Moreover, the combination of PCR with subsequent LCR to identify the nucleotides at individual positions is also a clearly cumbersome proposition for the clinical laboratory.

[0476] The direct detection method according to various preferred embodiments of the present invention may be, for example a cycling probe reaction (CPR) or a branched DNA analysis.

[0477] When a sufficient amount of a nucleic acid to be detected is available, there are advantages to detecting that sequence directly, instead of making more copies of that target, (e.g., as in PCR and LCR). Most notably, a method that does not amplify the signal exponentially is more amenable to quantitative analysis. Even if the signal is enhanced by attaching multiple dyes to a single oligonucleotide, the correlation between the final signal intensity and amount of target is direct. Such a system has an additional advantage that the products of the reaction will not themselves promote further reaction, so contamination of lab surfaces by the products is not as much of a concern. Recently devised techniques have sought to eliminate the use of radioactivity and/or improve the sensitivity in automatable formats. Two examples are the “Cycling Probe Reaction” (CPR), and “Branched DNA” (bDNA).

[0478] Cycling probe reaction (CPR): The cycling probe reaction (CPR), uses a long chimeric oligonucleotide in which a central portion is made of RNA while the two termini are made of DNA. Hybridization of the probe to a target DNA and exposure to a thermostable RNase H causes the RNA portion to be digested. This destabilizes the remaining DNA portions of the duplex, releasing the remainder of the probe from the target DNA and allowing another probe molecule to repeat the process. The signal, in the form of cleaved probe molecules, accumulates at a linear rate. While the repeating process increases the signal, the RNA portion of the oligonucleotide is vulnerable to RNases that may carried through sample preparation.

[0479] Branched DNA: Branched DNA (bDNA), involves oligonucleotides with branched structures that allow each individual oligonucleotide to carry 35 to 40 labels (e.g., alkaline phosphatase enzymes). While this enhances the signal from a hybridization event, signal from non-specific binding is similarly increased.

[0480] The detection of at least one sequence change according to various preferred embodiments of the present invention may be accomplished by, for example restriction fragment length polymorphism (RFLP analysis), allele specific oligonucleotide (ASO) analysis, Denaturing/Temperature Gradient Gel Electrophoresis (DGGE/TGGE), Single-Strand Conformation Polymorphism (SSCP) analysis or Dideoxy fingerprinting (ddF).

[0481] The demand for tests which allow the detection of specific nucleic acid sequences and sequence changes is growing rapidly in clinical diagnostics. As nucleic acid sequence data for genes from humans and pathogenic organisms accumulates, the demand for fast, cost-effective, and easy-to-use tests for as yet mutations within specific sequences is rapidly increasing.

[0482] A handful of methods have been devised to scan nucleic acid segments for mutations. One option is to determine the entire gene sequence of each test sample (e.g., a bacterial isolate). For sequences under approximately 600 nucleotides, this may be accomplished using amplified material (e.g., PCR reaction products). This avoids the time and expense associated with cloning the segment of interest. However, specialized equipment and highly trained personnel are required, and the method is too labor-intense and expensive to be practical and effective in the clinical setting.

[0483] In view of the difficulties associated with sequencing, a given segment of nucleic acid may be characterized on several other levels. At the lowest resolution, the size of the molecule can be determined by electrophoresis by comparison to a known standard run on the same gel. A more detailed picture of the molecule may be achieved by cleavage with combinations of restriction enzymes prior to electrophoresis, to allow construction of an ordered map. The presence of specific sequences within the fragment can be detected by hybridization of a labeled probe, or the precise nucleotide sequence can be determined by partial chemical degradation or by primer extension in the presence of chain-terminating nucleotide analogs.

[0484] Restriction fragment length polymorphism (RFLP): For detection of single-base differences between like sequences, the requirements of the analysis are often at the highest level of resolution. For cases in which the position of the nucleotide in question is known in advance, several methods have been developed for examining single base changes without direct sequencing. For example, if a mutation of interest happens to fall within a restriction recognition sequence, a change in the pattern of digestion can be used as a diagnostic tool (e.g., restriction fragment length polymorphism [RFLP] analysis).

[0485] Single point mutations have been also detected by the creation or destruction of RFLPs. Mutations are detected and localized by the presence and size of the RNA fragments generated by cleavage at the mismatches. Single nucleotide mismatches in DNA heteroduplexes are also recognized and cleaved by some chemicals, providing an alternative strategy to detect single base substitutions, generically named the “Mismatch Chemical Cleavage” (ICC). However, this method requires the use of osmium tetroxide and piperidine, two highly noxious chemicals which are not suited for use in a clinical laboratory.

[0486] RFLP analysis suffers from low sensitivity and requires a large amount of sample. When RFLP analysis is used for the detection of point mutations, it is, by its nature, limited to the detection of only those single base changes which fall within a restriction sequence of a known restriction endonuclease. Moreover, the majority of the available enzymes have 4 to 6 base-pair recognition sequences, and cleave too frequently for many large-scale DNA manipulations. Thus, it is applicable only in a small fraction of cases, as most mutations do not fall within such sites.

[0487] A handful of rare-cutting restriction enzymes with 8 base-pair specificities have been isolated and these are widely used in genetic mapping, but these enzymes are few in number, are limited to the recognition of G+C-rich sequences, and cleave at sites that tend to be highly clustered. Recently, endonucleases encoded by group I introns have been discovered that might have greater than 12 base-pair specificity, but again, these are few in number.

[0488] Allele specific oligonucleotide (ASO): If the change is not in a recognition sequence, then allele-specific oligonucleotides (ASOs), can be designed to hybridize in proximity to the mutated nucleotide, such that a primer extension or ligation event can bused as the indicator of a match or a mis-match. Hybridization with radioactively labeled allelic specific oligonucleotides (ASO) also has been applied to the detection of specific point mutations. The method is based on the differences in the melting temperature of short DNA fragments differing by a single nucleotide. Stringent hybridization and washing conditions can differentiate between mutant and wild-type alleles. The ASO approach applied to PCR products also has been extensively utilized by various researchers to detect and characterize point mutations in ras genes and gsp/gip oncogenes. Because of the presence of various nucleotide changes in multiple positions, the ASO method requires the use of many oligonucleotides to cover all possible oncogenic mutations.

[0489] With either of the techniques described above (i.e., RFLP and ASO), the precise location of the suspected mutation must be known in advance of the test. That is to say, they are inapplicable when one needs to detect the presence of a mutation within a gene or sequence of interest.

[0490] Denaturing/Temperature Gradient Gel Electrophoresis (DGGE/TGGE): Two other methods rely on detecting changes in electrophoretic mobility in response to minor sequence changes. One of these methods, termed “Denaturing Gradient Gel Electrophoresis” (DGGE) is based on the observation that slightly different sequences will display different patterns of local melting when electrophoretically resolved on a gradient gel. In this manner, variants can be distinguished, as differences in melting properties of homoduplexes versus heteroduplexes differing in a single nucleotide can detect the presence of mutations in the target sequences because of the corresponding changes in their electrophoretic mobilities. The fragments to be analyzed, usually PCR products, are “clamped” at one end by a long stretch of G-C base pairs (30-80) to allow complete denaturation of the sequence of interest without complete dissociation of the strands. The attachment of a GC “clamp” to the DNA fragments increases the fraction of mutations that can be recognized by DGGE. Attaching a GC clamp to one primer is critical to ensure that the amplified sequence has a low dissociation temperature. Modifications of the technique have been developed, using temperature gradients, and the method can be also applied to RNA:RNA duplexes.

[0491] Limitations on the utility of DGGE include the requirement that the denaturing conditions must be optimized for each type of DNA to be tested. Furthermore, the method requires specialized equipment to prepare the gels and maintain the needed high temperatures during electrophoresis. The expense associated with the synthesis of the clamping tail on one oligonucleotide for each sequence to be tested is also a major consideration. In addition, long running times are required for DGGE. The long running time of DGGE was shortened in a modification of DGGE called constant denaturant gel electrophoresis (CDGE). CDGE requires that gels be performed under different denaturant conditions in order to reach high efficiency for the detection of mutations.

[0492] A technique analogous to DGGE, termed temperature gradient gel electrophoresis (TGGE), uses a thermal gradient rather than a chemical denaturant gradient. TGGE requires the use of specialized equipment which can generate a temperature gradient perpendicularly oriented relative to the electrical field. TGGE can detect mutations in relatively small fragments of DNA therefore scanning of large gene segments requires the use of multiple PCR products prior to running the gel.

[0493] Single-Strand Conformation Polymorphism (SSCP): Another common method, called “Single-Strand Conformation Polymorphism” (SSCP) was developed by Hayashi, Sekya and colleagues and is based on the observation that single strands of nucleic acid can take on characteristic conformations in non-denaturing conditions, and these conformations influence electrophoretic mobility. The complementary strands assume sufficiently different structures that one strand may be resolved from the other. Changes in sequences within the fragment will also change the conformation, consequently altering the mobility and allowing this to be used as an assay for sequence variations.

[0494] The SSCP process involves denaturing a DNA segment (e.g., a PCR product) that is labeled on both strands, followed by slow electrophoretic separation on a non-denaturing polyacrylamide gel, so that intra-molecular interactions can form and not be disturbed during the run. This technique is extremely sensitive to variations in gel composition and temperature. A serious limitation of this method is the relative difficulty encountered in comparing data generated in different laboratories, under apparently similar conditions.

[0495] Dideoxy fingerprinting (ddF): The dideoxy fingerprinting (ddF) is another technique developed to scan genes for the presence of mutations. The ddF technique combines components of Sanger dideoxy sequencing with SSCP. A dideoxy sequencing reaction is performed using one dideoxy terminator and then the reaction products are electrophoresed on nondenaturing polyacrylamide gels to detect alterations in mobility of the termination segments as in SSCP analysis. While ddF is an improvement over SSCP in terms of increased sensitivity, ddF requires the use of expensive dideoxynucleotides and this technique is still limited to the analysis of fragments of the size suitable for SSCP (i.e., fragments of 200-300 bases for optimal detection of mutations).

[0496] In addition to the above limitations, all of these methods are limited as to the size of the nucleic acid fragment that can be analyzed. For the direct sequencing approach, sequences of greater than 600 base pairs require cloning, with the consequent delays and expense of either deletion sub-cloning or primer walking, in order to cover the entire fragment. SSCP and DGGE have even more severe size limitations. Because of reduced sensitivity to sequence changes, these methods are not considered suitable for larger fragments. Although SSCP is reportedly able to detect 90% of single-base substitutions within a 200 base-pair fragment, the detection drops to less than 50% for 400 base pair fragments. Similarly, the sensitivity of DGGE decreases as the length of the fragment reaches 500 base-pairs. The ddF technique, as a combination of direct sequencing and SSCP, is also limited by the relatively small size of the DNA that can be screened.

[0497] According to a presently preferred embodiment of the present invention the step of searching for any of the nucleic acid sequences described here, in tumor cells or in cells derived from a cancer patient is effected by any suitable technique, including, but not limited to, nucleic acid sequencing, polymerase chain reaction, ligase chain reaction, self-sustained synthetic reaction, Qβ-Replicase, cycling probe reaction, branched DNA, restriction fragment length polymorphism analysis, mismatch chemical cleavage, heteroduplex analysis, allele-specific oligonucleotides, denaturing gradient gel electrophoresis, constant denaturant gel electrophoresis, temperature gradient gel electrophoresis and dideoxy fingerprinting.

[0498] Detection may also optionally be performed with a chip or other such device. The nucleic acid sample which includes the candidate region to be analyzed is preferably isolated, amplified and labeled with a reporter group. This reporter group can be a fluorescent group such as phycoerythrin. The labeled nucleic acid is then incubated with the probes immobilized on the chip using a fluidics station. describe the fabrication of fluidics devices and particularly microcapillary devices, in silicon and glass substrates.

[0499] Once the reaction is completed, the chip is inserted into a scanner and patterns of hybridization are detected. The hybridization data is collected, as a signal emitted from the reporter groups already incorporated into the nucleic acid, which is now bound to the probes attached to the chip. Since the sequence and position of each probe immobilized on the chip is known, the identity of the nucleic acid hybridized to a given probe can be determined.

[0500] It will be appreciated that when utilized along with automated equipment, the above described detection methods can be used to screen multiple samples for a disease and/or pathological condition both rapidly and easily.

### Amino Acid Sequences and Peptides

[0501] The terms “polypeptide,” “peptide” and “protein” are used interchangeably herein to refer to a polymer of amino acid residues. The terms apply to amino acid polymers in which one or more amino acid residue is an analog or mimetic of a corresponding naturally occurring amino acid, as well as to naturally occurring amino acid polymers. Polypeptides can be modified, e.g., by the addition of carbohydrate residues to form glycoproteins. The terms “polypeptide,” “peptide” and “protein” include glycoproteins, as well as non-glycoproteins.

[0502] Polypeptide products can be biochemically synthesized such as by employing standard solid phase techniques. Such methods include but are not limited to exclusive solid phase synthesis, partial solid phase synthesis methods, fragment condensation, classical solution synthesis. These methods are preferably used when the peptide is relatively short (i.e., 10 kDa) and/or when it cannot be produced by recombinant techniques (i.e., not encoded by a nucleic acid sequence) and therefore involves different chemistry.

[0503] Solid phase polypeptide synthesis procedures are well known in the art and further described by John Morrow Stewart and Janis Dillaha Young, Solid Phase Peptide Syntheses (2nd Ed., Pierce Chemical Company, 1984).

[0504] Synthetic polypeptides can optionally be purified by preparative high performance liquid chromatography [Creighton T. (1983) Proteins, structures and molecular principles. WH Freeman and Co. N.Y.], after which their composition can be confirmed via amino acid sequencing.

[0505] In cases where large amounts of a polypeptide are desired, it can be generated using recombinant techniques such as described by Bitter et al., (1987) Methods in Enzymol. 153:516-544, Studier et al. (1990) Methods in Enzymol. 185:60-89, Brisson et al. (1984) Nature 310:511-514, Takamatsu et al. (1987) EMBO J. 6:307-311, Coruzzi et al. (1984) EMBO J. 3:1671-1680 and Brogli et al., (1984) Science 224:838-843, Gurley et al. (1986) Mol. Cell. Biol. 6:559-565 and Weissbach & Weissbach, 1988, Methods for Plant Molecular Biology, Academic Press, NY, Section VIII, pp 421-463.

[0506] The present invention also encompasses polypeptides encoded by the polynucleotide sequences of the present invention, as well as polypeptides according to the amino acid sequences described herein. The present invention also encompasses homologues of these polypeptides, such homologues can be at least 50%, at least 55%, at least 60%, at least 65%, at least 70%, at least 75%, at least 80%, at least 85%, at least 95% or more say 100% homologous to the amino acid sequences set forth below, as can be determined using BlastP software of the National Center of Biotechnology Information (NCBI) using default parameters, optionally and preferably including the following: filtering on (this option filters repetitive or low-complexity sequences from the query using the Seg (protein) program), scoring matrix is BLOSUM62 for proteins, word size is 3, E value is 10, gap costs are 11, 1 (initialization and extension), and number of alignments shown is 50. Preferably, nucleic acid sequence homology/identity is determined by using BlastN software of the National Center of Biotechnology Information (NCBI) using default parameters, which preferably include using the DUST filter program, and also preferably include having an E value of 10, filtering low complexity sequences and a word size of 11. Finally, the present invention also encompasses fragments of the above described polypeptides and polypeptides having mutations, such as deletions, insertions or substitutions of one or more amino acids, either naturally occurring or artificially induced, either randomly or in a targeted fashion.

[0507] It will be appreciated that peptides identified according the present invention may be degradation products, synthetic peptides or recombinant peptides as well as peptidomimetics, typically, synthetic peptides and peptoids and semipeptoids which are peptide analogs, which may have, for example, modifications rendering the peptides more stable while in a body or more capable of penetrating into cells. Such modifications include, but are not limited to N terminus modification, C terminus modification, peptide bond modification, including, but not limited to, CH2-NH, CH2-S, CH2-S═O, O═C—NH, CH2-O, CH2-CH2, S═C—NH, CH═CH or CF═CH, backbone modifications, and residue modification. Methods for preparing peptidomimetic compounds are well known in the art and are specified. Further details in this respect are provided hereinunder.

[0508] Peptide bonds (—CO—NH—) within the peptide may be substituted, for example, by N-methylated bonds (—N(CH3)-CO—), ester bonds (—C(R)H—C—O—O—C(R)—N—), ketomethylen bonds (—CO—CH2-), α-aza bonds (—NH—N(R)—CO—), wherein R is any alkyl, e.g., methyl, carba bonds (—CH2-NH—), hydroxyethylene bonds (—CH(OH)—CH2-), thioamide bonds (—CS—NH—), olefinic double bonds (—CH═CH—), retro amide bonds (—NH—CO—), peptide derivatives (—N(R)—CH₂—CO—), wherein R is the “normal” side chain, naturally presented on the carbon atom.

[0509] These modifications can occur at any of the bonds along the peptide chain and even at several (2-3) at the same time.

[0510] Natural aromatic amino acids, Trp, Tyr and Phe, may be substituted for synthetic non-natural acid such as Phenylglycine, TIC, naphthylelanine (Nol), ring-methylated derivatives of Phe, halogenated derivatives of Phe or o-methyl-Tyr.

[0511] In addition to the above, the peptides of the present invention may also include one or more modified amino acids or one or more non-amino acid monomers (e.g. fatty acids, complex carbohydrates etc).

[0512] As used herein in the specification and in the claims section below the term “amino acid” or “amino acids” is understood to include the 20 naturally occurring amino acids; those amino acids often modified post-translationally in vivo, including, for example, hydroxyproline, phosphoserine and phosphothreonine; and other unusual amino acids including, but not limited to, 2-aminoadipic acid, hydroxylysine, isodesmosine, nor-valine, nor-leucine and ornithine. Furthermore, the term “amino acid” includes both D- and L-amino acids. Non-conventional or modified amino acids can be incorporated in the polypeptides of this invention as well, as will be known to one skilled in the art.

[0513] Since the peptides of the present invention are preferably utilized in diagnostics which require the peptides to be in soluble form, the peptides of the present invention preferably include one or more non-natural or natural polar amino acids, including but not limited to serine and threonine which are capable of increasing peptide solubility due to their hydroxyl-containing side chain.

[0514] The peptides of the present invention are preferably utilized in a linear form, although it will be appreciated that in cases where cyclicization does not severely interfere with peptide characteristics, cyclic forms of the peptide can also be utilized.

[0515] The peptides of present invention can be biochemically synthesized such as by using standard solid phase techniques. These methods include exclusive solid phase synthesis well known in the art, partial solid phase synthesis methods, fragment condensation, classical solution synthesis. These methods are preferably used when the peptide is relatively short (i.e., 10 kDa) and/or when it cannot be produced by recombinant techniques (i.e., not encoded by a nucleic acid sequence) and therefore involves different chemistry.

[0516] Synthetic peptides can be purified by preparative high performance liquid chromatography and the composition of which can be confirmed via amino acid sequencing.

[0517] In cases where large amounts of the peptides of the present invention are desired, the peptides of the present invention can be generated using recombinant techniques such as described by Bitter et al., (1987) Methods in Enzymol. 153:516-544, Studier et al. (1990) Methods in Enzymol. 185:60-89, Brisson et al. (1984) Nature 310:511-514, Takamatsu et al. (1987) EMBO J. 6:307-311, Coruzzi et al. (1984) EMBO J. 3:1671-1680 and Brogli et al., (1984) Science 224:838-843, Gurley et al. (1986) Mol. Cell. Biol. 6:559-565 and Weissbach & Weissbach, 1988, Methods for Plant Molecular Biology, Academic Press, NY, Section VIII, pp 421-463 and also as described above.

[0518] Antibodies:

[0519] “Antibody” refers to a polypeptide ligand that is preferably substantially encoded by an immunoglobulin gene or immunoglobulin genes, or fragments thereof, which specifically binds and recognizes an epitope (e.g., an antigen). The recognized immunoglobulin genes include the kappa and lambda light chain constant region genes, the alpha, gamma, delta, epsilon and mu heavy chain constant region genes, and the myriad-immunoglobulin variable region genes. Antibodies exist, e.g., as intact immunoglobulins or as a number of well characterized fragments produced by digestion with various peptidases. This includes, e.g., Fab′ and F(ab)′2 fragments. The term “antibody,” as used herein, also includes antibody fragments either produced by the modification of whole antibodies or those synthesized de novo using recombinant DNA methodologies. It also includes polyclonal antibodies, monoclonal antibodies, chimeric antibodies, humanized antibodies, or single chain antibodies. “Fc” portion of an antibody refers to that portion of an immunoglobulin heavy chain that comprises one or more heavy chain constant region domains, CH1, CH2 and CH3, but does not include the heavy chain variable region.

[0520] The functional fragments of antibodies, such as Fab, F(ab′)2, and Fv that are capable of binding to macrophages, are described as follows: (1) Fab, the fragment which contains a monovalent antigen-binding fragment of an antibody molecule, can be produced by digestion of whole antibody with the enzyme papain to yield an intact light chain and a portion of one heavy chain; (2) Fab′, the fragment of an antibody molecule that can be obtained by treating whole antibody with pepsin, followed by reduction, to yield an intact light chain and a portion of the heavy chain; two Fab′ fragments are obtained per antibody molecule; (3) (Fab′)₂, the fragment of the antibody that can be obtained by treating whole antibody with the enzyme pepsin without subsequent reduction; F(ab′)2 is a dimer of two Fab′ fragments held together by two disulfide bonds; (4) Fv, defined as a genetically engineered fragment containing the variable region of the light chain and the variable region of the heavy chain expressed as two chains; and (5) Single chain antibody (“SCA”), a genetically engineered molecule containing the variable region of the light chain and the variable region of the heavy chain, linked by a suitable polypeptide linker as a genetically fused single chain molecule.

[0521] Methods of producing polyclonal and monoclonal antibodies as well as fragments thereof are well known in the art (See for example, Harlow and Lane, Antibodies: A Laboratory Manual, Cold Spring Harbor Laboratory, New York, 1988, incorporated herein by reference).

[0522] Monoclonal antibody development may optionally be performed according to any method that is known in the art. The method described below is provided for the purposes of description only and is not meant to be limiting in any way.

### Antibody Engineering in Phage Display Libraries:

[0523] Antibodies of this invention may be prepared through the use of phage display libraries, as is known in the art, for example, as described in PCT Application No. WO 94/18219, U.S. Pat. No. 6,096,551, both of which are hereby fully incorporated by reference. The method involves inducing mutagenesis in a complementarity determining region (CDR) of an immunoglobulin light chain gene for the purpose of producing light chain gene libraries for use in combination with heavy chain genes and gene libraries to produce antibody libraries of diverse and novel immuno-specificities. The method comprises amplifying a CDR portion of an immunoglobulin light chain gene by polymerase chain reaction (PCR) using a PCR primer oligonucleotide. The resultant gene portions are inserted into phagemids for production of a phage display library, wherein the engineered light chains are displayed by the phages, for example for testing their binding specificity.

[0524] Antibody fragments according to the present invention can be prepared by proteolytic hydrolysis of the antibody or by expression in E. coli or mammalian cells (e.g. Chinese hamster ovary cell culture or other protein expression systems) of DNA encoding the fragment. Antibody fragments can be obtained by pepsin or papain digestion of whole antibodies by conventional methods. For example, antibody fragments can be produced by enzymatic cleavage of antibodies with pepsin to provide a 5S fragment denoted F(ab′)₂. This fragment can be further cleaved using a thiol reducing agent, and optionally a blocking group for the sulfhydryl groups resulting from cleavage of disulfide linkages, to produce 3.5S Fab′ monovalent fragments. Alternatively, an enzymatic cleavage using Papain produces two monovalent Fab′ fragments and an Fc fragment directly. These methods are described, for example, by Goldenberg, U.S. Pat. Nos. 4,036,945 and 4,331,647, and references contained therein, which patents are hereby incorporated by reference in their entirety. See also Porter, R. R. [Biochem. J. 73: 119-126 (1959)]. Other methods of cleaving antibodies, such as separation of heavy chains to form monovalent light-heavy chain fragments, further cleavage of fragments, or other enzymatic, chemical, or genetic techniques may also be used, so long as the fragments bind to the antigen that is recognized by the intact antibody.

[0525] Fv fragments comprise an association of VH and VL chains. This association may be noncovalent, as described in Inbar et al. [Proc. Nat'l Acad. Sci. USA 69:2659-62 (1972)]. Alternatively, the variable chains can be linked by an intermolecular disulfide bond or cross-linked by chemicals such as glutaraldehyde. Preferably, the Fv fragments comprise VH and VL chains connected by a peptide linker. These single-chain antigen binding proteins (sFv) are prepared by constructing a structural gene comprising DNA sequences encoding the VH and VL domains connected by an oligonucleotide. The structural gene is inserted into an expression vector, which is subsequently introduced into a host cell such as E. coli. The recombinant host cells synthesize a single polypeptide chain with a linker peptide bridging the two V domains. A scFv antibody fragment is an engineered antibody derivative that includes heavy- and light chain variable regions joined by a peptide linker. The minimal size of antibody molecules are those that still comprise the complete antigen binding site. ScFv antibody fragments are potentially more effective than unmodified IgG antibodies. The reduced size of 27-30 kDa permits them to penetrate tissues and solid tumors more readily. Methods for producing sFvs are described, for example, by [Whitlow and Filpula, Methods 2: 97-105 (1991); Bird et al., Science 242:423-426 (1988); Pack et al., Bio/Technology 11:1271-77 (1993); and U.S. Pat. No. 4,946,778, which is hereby incorporated by reference in its entirety.

[0526] Another form of an antibody fragment is a peptide coding for a single complementarity-determining region (CDR). CDR peptides (“minimal recognition units”) can be obtained by constructing genes encoding the CDR of an antibody of interest. Such genes are prepared, for example, by using the polymerase chain reaction to synthesize the variable region from RNA of antibody-producing cells. See, for example, Larrick and Fry [Methods, 2: 106-10 (1991)]. Optionally, there may be 1, 2 or 3 CDRs of different chains, but preferably there are 3 CDRs of 1 chain. The chain could be the heavy or the light chain.

[0527] Humanized forms of non-human (e.g., murine) antibodies, are chimeric molecules of immunoglobulins, immunoglobulin chains or fragments thereof (such as Fv, Fab, Fab′, F(ab′) or other antigen-binding subsequences of antibodies) which contain minimal sequence derived from non-human immunoglobulin, or fragments thereof may comprise the antibodies of this invention. Humanized antibodies are well known in the art. Methods for humanizing non-human antibodies are well known in the art, for example, as described in Winter and co-workers [Jones et al., Nature, 321:522-525 (1986); Riechmann et al., Nature 332:323-327 (1988); Verhoeyen et al., Science, 239:1534-1536 (1988)], U.S. Pat. No. 4,816,567, Hoogenboom and Winter, J. Mol. Biol., 227:381 (1991); Marks et al., J. Mol. Biol., 222:581 (1991), Cole et al., Monoclonal Antibodies and Cancer Therapy, Alan R. Liss, p. 77 (1985), Boerner et al., J. Immunol., 147(1):86-95 (1991), U.S. Pat. Nos. 5,545,807; 5,545,806; 5,569,825; 5,625,126; 5,633,425; 5,661,016, and in the following scientific publications: Marks et al., Bio/Technology 10: 779-783 (1992); Lonberg et al., Nature 368: 856-859 (1994); Morrison, Nature 368 812-13 (1994); Fishwild et al., Nature Biotechnology 14, 845-51 (1996); Neuberger, Nature Biotechnology 14: 826 (1996); and Lonberg and Huszar, Intern. Rev. Immunol. 13, 65-93 (1995), all of which are incorporated herein by reference.

[0528] Preferably, the antibody of this aspect of the present invention specifically binds at least one epitope of the polypeptide variants of the present invention. As used herein, the term “epitope” refers to any antigenic determinant on an antigen to which the paratope of an antibody binds.

[0529] Epitopic determinants usually consist of chemically active surface groupings of molecules such as amino acids or carbohydrate side chains and usually have specific three dimensional structural characteristics, as well as specific charge characteristics.

[0530] Optionally, a unique epitope may be created in a variant due to a change in one or more post-translational modifications, including but not limited to glycosylation and/or phosphorylation, as described below. Such a change may also cause a new epitope to be created, for example through removal of glycosylation at a particular site.

[0531] An epitope according to the present invention may also optionally comprise part or all of a unique sequence portion of a variant according to the present invention in combination with at least one other portion of the variant which is not contiguous to the unique sequence portion in the linear polypeptide itself, yet which are able to form an epitope in combination. One or more unique sequence portions may optionally combine with one or more other non-contiguous portions of the variant (including a portion which may have high homology to a portion of the known protein) to form an epitope.

### Immunoassays

[0532] In another embodiment of the present invention, an immunoassay can be used to qualitatively or quantitatively detect and analyze markers in a sample. This method comprises: providing an antibody that specifically binds to a marker; contacting a sample with the antibody; and detecting the presence of a complex of the antibody bound to the marker in the sample.

[0533] To prepare an antibody that specifically binds to a marker, purified protein markers can be used. Antibodies that specifically bind to a protein marker can be prepared using any suitable methods known in the art.

[0534] After the antibody is provided, a marker can be detected and/or quantified using any of a number of well recognized immunological binding assays. Useful assays include, for example, an enzyme immune assay (EIA) such as enzyme-linked immunosorbent assay (ELISA), a radioimmune assay (RIA), a Western blot assay, or a slot blot assay see, e.g., U.S. Pat. Nos. 4,366,241; 4,376,110; 4,517,288; and 4,837,168). Generally, a sample obtained from a subject can be contacted with the antibody that specifically binds the marker.

[0535] Optionally, the antibody can be fixed to a solid support to facilitate washing and subsequent isolation of the complex, prior to contacting the antibody with a sample. Examples of solid supports include but are not limited to glass or plastic in the form of, e.g., a microtiter plate, a stick, a bead, or a microbead. Antibodies can also be attached to a solid support.

[0536] After incubating the sample with antibodies, the mixture is washed and the antibody-marker complex formed can be detected. This can be accomplished by incubating the washed mixture with a detection reagent. Alternatively, the marker in the sample can be detected using an indirect assay, wherein, for example, a second, labeled antibody is used to detect bound marker-specific antibody, and/or in a competition or inhibition assay wherein, for example, a monoclonal antibody which binds to a distinct epitope of the marker are incubated simultaneously with the mixture.

[0537] Throughout the assays, incubation and/or washing steps may be required after each combination of reagents. Incubation steps can vary from about 5 seconds to several hours, preferably from about 5 minutes to about 24 hours. However, the incubation time will depend upon the assay format, marker, volume of solution, concentrations and the like. Usually the assays will be carried out at ambient temperature, although they can be conducted over a range of temperatures, such as 10° C. to 40° C.

[0538] The immunoassay can be used to determine a test amount of a marker in a sample from a subject. First, a test amount of a marker in a sample can be detected using the immunoassay methods described above. If a marker is present in the sample, it will form an antibody-marker complex with an antibody that specifically binds the marker under suitable incubation conditions described above. The amount of an antibody-marker complex can optionally be determined by comparing to a standard. As noted above, the test amount of marker need not be measured in absolute units, as long as the unit of measurement can be compared to a control amount and/or signal.

[0539] Preferably used are antibodies which specifically interact with the polypeptides of the present invention and not with wild type proteins or other isoforms thereof, for example. Such antibodies are directed, for example, to the unique sequence portions of the polypeptide variants of the present invention, including but not limited to bridges, heads, tails and insertions described in greater detail below. Preferred embodiments of antibodies according to the present invention are described in greater detail with regard to the section entitled “Antibodies”.

[0540] Radio-immunoassay (RIA): In one version, this method involves precipitation of the desired substrate and in the methods detailed hereinbelow, with a specific antibody and radiolabelled antibody binding protein (e.g., protein A labeled with I¹²⁵) immobilized on a precipitable carrier such as agarose beads. The number of counts in the precipitated pellet is proportional to the amount of substrate.

[0541] In an alternate version of the RIA, a labeled substrate and an unlabelled antibody binding protein are employed. A sample containing an unknown amount of substrate is added in varying amounts. The decrease in precipitated counts from the labeled substrate is proportional to the amount of substrate in the added sample.

[0542] Enzyme linked immunosorbent assay (ELISA): This method involves fixation of a sample (e.g., fixed cells or a proteinaceous solution) containing a protein substrate to a surface such as a well of a microtiter plate. A substrate specific antibody coupled to an enzyme is applied and allowed to bind to the substrate. Presence of the antibody is then detected and quantitated by a calorimetric reaction employing the enzyme coupled to the antibody. Enzymes commonly employed in this method include horseradish peroxidase and alkaline phosphatase. If well calibrated and within the linear range of response, the amount of substrate present in the sample is proportional to the amount of color produced. A substrate standard is generally employed to improve quantitative accuracy.

[0543] Western blot: This method involves separation of a substrate from other protein by means of an acrylamide gel followed by transfer of the substrate to a membrane (e.g., nylon or PVDF). Presence of the substrate is then detected by antibodies specific to the substrate, which are in turn detected by antibody binding reagents. Antibody binding reagents may be, for example, protein A, or other antibodies. Antibody binding reagents may be radiolabelled or enzyme linked as described hereinabove. Detection may be by autoradiography, colorimetric reaction or chemiluminescence. This method allows both quantitation of an amount of substrate and determination of its identity by a relative position on the membrane which is indicative of a migration distance in the acrylamide gel during electrophoresis.

[0544] Immunohistochemical analysis: This method involves detection of a substrate in situ in fixed cells by substrate specific antibodies. The substrate specific antibodies may be enzyme linked or linked to fluorophores. Detection is by microscopy and subjective evaluation. If enzyme linked antibodies are employed, a calorimetric reaction may be required.

[0545] Fluorescence activated cell sorting (FACS): This method involves detection of a substrate in situ in cells by substrate specific antibodies. The substrate specific antibodies are linked to fluorophores. Detection is by means of a cell sorting machine which reads the wavelength of light emitted from each cell as it passes through a light beam. This method may employ two or more antibodies simultaneously.

### Radio-Imaging Methods

[0546] These methods include but are not limited to, positron emission tomography (PET) single photon emission computed tomography (SPECT). Both of these techniques are non-invasive, and can be used to detect and/or measure a wide variety of tissue events and/or functions, such as detecting cancerous cells for example. Unlike PET, SPECT can optionally be used with two labels simultaneously. SPECT has some other advantages as well, for example with regard to cost and the types of labels that can be used. For example, U.S. Pat. No. 6,696,686 describes the use of SPECT for detection of breast cancer, and is hereby incorporated by reference as if fully set forth herein.

### Display Libraries

[0547] According to still another aspect of the present invention there is provided a display library comprising a plurality of display vehicles (such as phages, viruses or bacteria) each displaying at least 6, at least 7, at least 8, at least 9, at least 10, 10-15, 12-17, 15-20, 15-30 or 20-50 consecutive amino acids derived from the polypeptide sequences of the present invention.

[0548] Methods of constructing such display libraries are well known in the art. Such methods are described in, for example, Young A C, et al., “The three-dimensional structures of a polysaccharide binding antibody to Cryptococcus neoformans and its complex with a peptide from a phage display library: implications for the identification of peptide mimotopes” J Mol Biol 1997 Dec. 12; 274(4):622-34; Giebel L B et al. “Screening of cyclic peptide phage libraries identifies ligands that bind streptavidin with high affinities” Biochemistry 1995 Nov. 28; 34(47):15430-5; Davies E L et al., “Selection of specific phage-display antibodies using libraries derived from chicken immunoglobulin genes” J Immunol Methods 1995 Oct. 12; 186(1):125-35; Jones C R T al. “Current trends in molecular recognition and bioseparation” J Chromatogr A 1995 Jul. 14; 707(1):3-22; Deng S J et al. “Basis for selection of improved carbohydrate-binding single-chain antibodies from synthetic gene libraries” Proc Natl Acad Sci USA 1995 May 23; 92(11):4992-6; and Deng S J et al. “Selection of antibody single-chain variable fragments with improved carbohydrate binding by phage display” J Biol Chem 1994 Apr. 1; 269(13):9533-8, which are incorporated herein by reference.

### Theranostics:

[0549] The term theranostics describes the use of diagnostic testing to diagnose the disease, choose the correct treatment regime according to the results of diagnostic testing and/or monitor the patient response to therapy according to the results of diagnostic testing. Theranostic tests can be used to select patients for treatments that are particularly likely to benefit them and unlikely to produce side-effects. They can also provide an early and objective indication of treatment efficacy in individual patients, so that (if necessary) the treatment can be altered with a minimum of delay. For example: DAKO and Genentech together created HercepTest and Herceptin (trastuzumab) for the treatment of breast cancer, the first theranostic test approved simultaneously with a new therapeutic drug. In addition to HercepTest (which is an immunohistochemical test), other theranostic tests are in development which use traditional clinical chemistry, immunoassay, cell-based technologies and nucleic acid tests. PPGx's recently launched TPMT (thiopurine S-methyltransferase) test, which is enabling doctors to identify patients at risk for potentially fatal adverse reactions to 6-mercaptopurine, an agent used in the treatment of leukemia. Also, Nova Molecular pioneered SNP genotyping of the apolipoprotein E gene to predict Alzheimer's disease patients' responses to cholinomimetic therapies and it is now widely used in clinical trials of new drugs for this indication. Thus, the field of theranostics represents the intersection of diagnostic testing information that predicts the response of a patient to a treatment with the selection of the appropriate treatment for that particular patient.

### Surrogate Markers:

[0550] A surrogate marker is a marker, that is detectable in a laboratory and/or according to a physical sign or symptom on the patient, and that is used in therapeutic trials as a substitute for a clinically meaningful endpoint. The surrogate marker is a direct measure of how a patient feels, functions, or survives which is expected to predict the effect of the therapy. The need for surrogate markers mainly arises when such markers can be measured earlier, more conveniently, or more frequently than the endpoints of interest in terms of the effect of a treatment on a patient, which are referred to as the clinical endpoints. Ideally, a surrogate marker should be biologically plausible, predictive of disease progression and measurable by standardized assays (including but not limited to traditional clinical chemistry, immunoassay, cell-based technologies, nucleic acid tests and imaging modalities).

[0551] Surrogate endpoints were used first mainly in the cardiovascular area. For example, antihypertensive drugs have been approved based on their effectiveness in lowering blood pressure. Similarly, in the past, cholesterol-lowering agents have been approved based on their ability to decrease serum cholesterol, not on the direct evidence that they decrease mortality from atherosclerotic heart disease. The measurement of cholesterol levels is now an accepted surrogate marker of atherosclerosis. In addition, currently two commonly used surrogate markers in HIV studies are CD4+ T cell counts and quantitative plasma HIV RNA (viral load). In some embodiments of this invention, the polypeptide/polynucleotide expression pattern may serve as a surrogate marker for a particular disease, as will be appreciated by one skilled in the art.

### Monoclonal Antibody Therapy:

[0552] In some embodiments, monoclonal antibodies are useful for the identification of cancer cells. In some embodiments, monoclonal antibody therapy is a form of passive immunotherapy useful in cancer treatment. Such antibodies may comprise naked monoclonal antibodies or conjugated monoclonal antibodies—joined to a chemotherapy drug, radioactive particle, or a toxin (a substance that poisons cells). In some embodiments, the former is directly cytotoxic to the target (cancer) cell, or in another embodiment, stimulates or otherwise participates in an immune response ultimately resulting in the lysis of the target cell.

[0553] In some embodiments, the conjugated monoclonal antibodies are joined to drugs, toxins, or radioactive atoms. They are used as delivery vehicles to take those substances directly to the cancer cells. The MAb acts as a homing device, circulating in the body until it finds a cancer cell with a matching antigen. It delivers the toxic substance to where it is needed most, minimizing damage to normal cells in other parts of the body. Conjugated MAbs are also sometimes referred to as “tagged,” “labeled,” or “loaded” antibodies. MAbs with chemotherapy drugs attached are generally referred to as chemolabeled. MAbs with radioactive particles attached are referred to as radiolabeled, and this type of therapy is known as radioimmunotherapy (RIT). MAbs attached to toxins are called immunotoxins.

[0554] An illustrative, non-limiting example is provided herein of a method of treatment of a patient with an antibody to a variant as described herein, such that the variant is a target of the antibody. A patient with breast cancer is treated with a radiolabeled humanized antibody against an appropriate breast cancer target as described herein. The patient is optionally treated with a dosage of labeled antibody ranging from 10 to 30 mCi. Of course any type of therapeutic label may optionally be used.

[0555] The following sections relate to Candidate Marker Examples. It should be noted that Table numbering is restarted within each Example, which starts with the words “Description for Cluster”.

[0556] The following sections relate to Candidate Marker Examples.

### CANDIDATE MARKER EXAMPLES SECTION

[0557] This Section relates to Examples of sequences according to the present invention, including illustrative methods of selection thereof with regard to cancer; other markers were selected as described below for the individual markers.

[0558] Description of the methodology undertaken to uncover the biomolecular sequences of the present invention

[0559] Human ESTs and cDNAs were obtained from GenBank versions 136 (Jun. 15, 2003 ftp.ncbi.nih.gov/genbank/release.notes/gb136.release.notes); NCBI genome assembly of April 2003; RefSeq sequences from June 2003; Genbank version 139 (December 2003); Human Genome from NCBI (Build 34) (from October 2003); and RefSeq sequences from December 2003. With regard to GenBank sequences, the human EST sequences from the EST (GBEST) section and the human mRNA sequences from the primate (GBPR1) section were used; also the human nucleotide RefSeq mRNA sequences were used (see for example www.ncbi.nlm.nih.gov/Genbank/GenbankOverview.html and for a reference to the EST section, see www.ncbi.nlm.nih.gov/dbEST/; a general reference to dbEST, the EST database in GenBank, may be found in Boguski et al, Nat. Genet. 1993 August; 4(4):332-3; all of which are hereby incorporated by reference as if fully set forth herein).

[0560] Novel splice variants were predicted using the LEADS clustering and assembly system as described in Sorek, R., Ast, G. & Graur, D. Alu-containing exons are alternatively spliced. Genome Res 12, 1060-7 (2002); U.S. Pat. No. 6,625,545; and U.S. patent application Ser. No. 10/426,002, published as US20040101876 on May 27, 2004; all of which are hereby incorporated by reference as if fully set forth herein. Briefly, the software cleans the expressed sequences from repeats, vectors and immunoglobulins. It then aligns the expressed sequences to the genome taking alternatively splicing into account and clusters overlapping expressed sequences into “clusters” that represent genes or partial genes.

[0561] These were annotated using the GeneCarta (Compugen, Tel-Aviv, Israel) platform. The GeneCarta platform includes a rich pool of annotations, sequence information (particularly of spliced sequences), chromosomal information, alignments, and additional information such as SNPs, gene ontology terms, expression profiles, functional analyses, detailed domain structures, known and predicted proteins and detailed homology reports.

[0562] A brief explanation is provided with regard to the method of selecting the candidates. However, it should be noted that this explanation is provided for descriptive purposes only, and is not intended to be limiting in any way. The potential markers were identified by a computational process that was designed to find genes and/or their splice variants that are specifically expressed in cardiac tissue, as opposed to other types of tissues and also particularly as opposed to muscle tissue, by using databases of expressed sequences. Various parameters related to the information in the EST libraries, determined according to classification by library annotation, were used to assist in locating genes and/or splice variants thereof that are specifically and/or differentially expressed in heart tissues. The detailed description of the selection method and of these parameters is presented in Example 1 below.

Selecting Candidates with Regard to Cancer

[0563] A brief explanation is provided with regard to a non-limiting method of selecting the candidates for cancer diagnostics. However, it should noted that this explanation is provided for descriptive purposes only, and is not intended to be limiting in any way. The potential markers were identified by a computational process that was designed to find genes and/or their splice variants that are over-expressed in tumor tissues, by using databases of expressed sequences. Various parameters related to the information in the EST libraries, determined according to a manual classification process, were used to assist in locating genes and/or splice variants thereof that are over-expressed in cancerous tissues. The detailed description of the selection method is presented in Example 1 below. The cancer biomarkers selection engine and the following wet validation stages are schematically summarized in FIG. 1.

### Example 1

### Identification of Differentially Expressed Gene Products

### Algorithm

[0564] In order to distinguish between differentially expressed gene products and constitutively expressed genes (i.e., house keeping genes) an algorithm based on an analysis of frequencies was configured. A specific algorithm for identification of transcripts over expressed in cancer is described hereinbelow.

[0565] Dry Analysis
[0566] Library annotation—EST libraries are manually classified according to:
[0567] (i) Tissue origin
[0568] (ii) Biological source—Examples of frequently used biological sources for construction of EST libraries include cancer cell-lines; normal tissues; cancer tissues; fetal tissues; and others such as normal cell lines and pools of normal cell-lines, cancer cell-lines and combinations thereof. A specific description of abbreviations used below with regard to these tissues/cell lines etc is given above.
[0569] (iii) Protocol of library construction—various methods are known in the art for library construction including normalized library construction; non-normalized library construction; subtracted libraries; ORESTES and others. It will be appreciated that at times the protocol of library construction is not indicated.

[0570] The following rules are followed:

[0571] EST libraries originating from identical biological samples are considered as a single library.

[0572] EST libraries which include above-average levels of DNA contamination are eliminated.

[0573] Dry computation—development of engines which are capable of identifying genes and splice variants that are temporally and spacially expressed.

[0574] Clusters (genes) having at least five sequences including at least two sequences from the tissue of interest are analyzed.

### Example 2

### Identification of Genes Over Expressed in Cancer

[0575] Two different scoring algorithms were developed.

[0576] Libraries score—candidate sequences which are supported by a number of cancer libraries, are more likely to serve as specific and effective diagnostic markers.

[0577] The basic algorithm—for each cluster the number of cancer and normal libraries contributing sequences to the cluster was counted. Fisher exact test was used to check if cancer libraries are significantly over-represented in the cluster as compared to the total number of cancer and normal libraries.

[0578] Library counting: Small libraries (e.g., less than 1000 sequences) were excluded from consideration unless they participate in the cluster. For this reason, the total number of libraries is actually adjusted for each cluster.

[0579] Clones no. score—Generally, when the number of ESTs is much higher in the cancer libraries relative to the normal libraries it might indicate actual over-expression.

[0580] The Algorithm—

[0581] Clone counting: For counting EST clones each library protocol class was given a weight based on an assessment of how much the protocol reflects actual expression levels:

[0582] (i) non-normalized: 1

[0583] (ii) normalized: 0.2

[0584] (iii) all other classes: 0.1

[0585] Clones number score—The total weighted number of EST clones from cancer libraries was compared to the EST clones from normal libraries. To avoid cases where one library contributes to the majority of the score, the contribution of the library that gives most clones for a given cluster was limited to 2 clones.

[0586] The score was computed as

$$\frac{c + 1}{C} / \frac{n + 1}{N}$$

[0587] where:

[0588] c—weighted number of “cancer” clones in the cluster.

[0589] C—weighted number of clones in all “cancer” libraries.

[0590] n—weighted number of “normal” clones in the cluster.

[0591] N—weighted number of clones in all “normal” libraries.

[0592] Clones number score significance—Fisher exact test was used to check if EST clones from cancer libraries are significantly over-represented in the cluster as compared to the total number of EST clones from cancer and normal libraries.

[0593] Two search approaches were used to find either general cancer-specific candidates or tumor specific candidates.
[0594] Libraries/sequences originating from tumor tissues are counted as well as libraries originating from cancer cell-lines (“normal” cell-lines were ignored).
[0595] Only libraries/sequences originating from tumor tissues are counted

### Example 3

### Identification of Tissue Specific Genes

[0596] For detection of tissue specific clusters, tissue libraries/sequences were compared to the total number of libraries/sequences in cluster. Similar statistical tools to those described in above were employed to identify tissue specific genes. Tissue abbreviations are the same as for cancerous tissues, but are indicated with the header “normal tissue”.

[0597] The algorithm—for each tested tissue T and for each tested cluster the following were examined:

[0598] 1. Each cluster includes at least 2 libraries from the tissue T. At least 3 clones (weighed—as described above) from tissue T in the cluster; and

[0599] 2. Clones from the tissue T are at least 40% from all the clones participating in the tested cluster

[0600] Fisher exact test P-values were computed both for library and weighted clone counts to check that the counts are statistically significant.

### Example 4

### Identification of Splice Variants Over Expressed in Cancer of Clusters which are not Over Expressed in Cancer

[0601] Cancer-specific splice variants containing a unique region were identified.

[0602] Identification of unique sequence regions in splice variants

[0603] A Region is defined as a group of adjacent exons that always appear or do not appear together in each splice variant.

[0604] A “segment” (sometimes referred also as “seg” or “node”) is defined as the shortest contiguous transcribed region without known splicing inside.

[0605] Only reliable ESTs were considered for region and segment analysis. An EST was defined as unreliable if:

[0606] (i) Unspliced;

[0607] (ii) Not covered by RNA;

[0608] (iii) Not covered by spliced ESTs; and

[0609] (iv) Alignment to the genome ends in proximity of long poly-A stretch or starts in proximity of long poly-T stretch.

[0610] Only reliable regions were selected for further scoring. Unique sequence regions were considered reliable if:

[0611] (i) Aligned to the genome; and

[0612] (ii) Regions supported by more than 2 ESTs.

[0613] The Algorithm

[0614] Each unique sequence region divides the set of transcripts into 2 groups:

[0615] (i) Transcripts containing this region (group TA).

[0616] (ii) Transcripts not containing this region (group TB).

[0617] The set of EST clones of every cluster is divided into 3 groups:

[0618] (i) Supporting (originating from) transcripts of group TA (S1).

[0619] (ii) Supporting transcripts of group TB (S2).

[0620] (iii) Supporting transcripts from both groups (S3).

[0621] Library and clones number scores described above were given to S1 group.

[0622] Fisher Exact Test P-values were used to check if:

[0623] S1 is significantly enriched by cancer EST clones compared to S2; and

[0624] S1 is significantly enriched by cancer EST clones compared to cluster background (S1+S2+S3).

[0625] Identification of unique sequence regions and division of the group of transcripts accordingly is illustrated in FIG. 2. Each of these unique sequence regions corresponds to a segment, also termed herein a “node”.

[0626] Region 1: common to all transcripts, thus it is not considered; Region 2: specific to Transcript 1: T_{—}1 unique regions (2+6) against T_{—}2+3 unique regions (3+4); Region 3: specific to Transcripts 2+3: T_{—}2+3 unique regions (3+4) against T1 unique regions (2+6); Region 4: specific to Transcript 3: T_{—}3 unique regions (4) against T1+2 unique regions (2+5+6); Region 5: specific to Transcript 1+2: T_{—}1+2 unique regions (2+5+6) against T3 unique regions (4); Region 6: specific to Transcript 1: same as region 2.

### Example 5

### Identification of Cancer Specific Splice Variants of Genes Over Expressed in Cancer

[0627] A search for EST supported (no mRNA) regions for genes of:

[0628] (i) known cancer markers

[0629] (ii) Genes shown to be over-expressed in cancer in published micro-array experiments.

[0630] Reliable EST supported-regions were defined as supported by minimum of one of the following:

[0631] (i) 3 spliced ESTs; or

[0632] (ii) 2 spliced ESTs from 2 libraries;

[0633] (iii) 10 unspliced ESTs from 2 libraries, or

[0634] (iv) 3 libraries.

### Example 6

[0635] Diseases and conditions that may be diagnosed with one or more variant(s) according to the present invention.

[0636] Various non-limiting examples are given below of cancerous conditions for which one or more variants according to the present invention may have a diagnostic, or therapeutic utility.

### Ovarian Cancer

[0637] Ovarian cancer causes more deaths than any other cancer of the female reproductive system, however, only 25% of ovarian cancers are detected in stage I. No single marker has been shown to be sufficiently sensitive or specific to contribute to the diagnosis of ovarian cancer.

[0638] In one embodiment, the markers of this invention are utilized alone, or in combination with other markers, for the diagnosis, treatment or assessment of prognosis of ovarian cancer. Such other markers may comprise CA-125 or mucin 16, CA-50, CA 54-61, CA-195 and CA 19-9, STN and TAG-72, kallikreins, cathepsin L, urine gonadotropin, inhibins, cytokeratins, such as TPA and TPS, members of the Transforming Growth Factors (TGF) beta superfamily, Epidermal Growth Factor, p53 and HER-2 or any combination thereof.

[0639] Immunohistochemistry may be used to assess the origin of the tumor and staging as part of the methods of this invention, and as protected uses for the polypeptides of this invention.

[0640] In some embodiments, this invention provides polypeptides/polynucleotides which serves as markers for ovarian cancer. In some embodiments, the marker is any polypeptide/polynucleotide as described herein. In some embodiments, the marker is an AA583399, H13410, H61775, T86235, HUMPAX8A, N31842, T58132, or variants as described herein or markers related thereto. Each variant marker of the present invention described herein may be used alone or in combination with one or more other variant ovarian cancer described herein, and/or in combination with known markers for ovarian cancer, as described herein. Diagnosis of ovarian cancer and or of other conditions that may be diagnosed by these markers or variants of them include but are not limited to the presence, risk and/or extent of the following:
[0641] 1. The identification of a metastasis of unknown origin which originated from a primary ovarian cancer.
[0642] 2. As a marker to distinguish between different types of ovarian cancer, therefore potentially affect treatment choice (e.g. discrimination between epithelial tumors and germ cell tumors).
[0643] 3. As a tool in the assessment of abdominal mass and in particular in the differential diagnosis between a benign and malignant ovarian cysts.
[0644] 4. As a tool for the assessment of infertility.
[0645] 5. Other conditions that may elevate serum levels of ovary related markers. These include but are not limited to: cancers of the endometrium, cervix, fallopian tubes, pancreas, breast, lung and colon; nonmalignant conditions such as pregnancy, endometriosis, pelvic inflammatory disease and uterine fibroids.
[0646] 6. Conditions which have similar symptoms, signs and complications as ovarian cancer and where the differential diagnosis between them and ovarian cancer is of clinical importance including but not limited to:
   [0647] a. Non-malignant causes of pelvic mass. Including, but not limited to: benign (functional) ovarian cyst, uterine fibroids, endometriosis, benign ovarian neoplasms and inflammatory bowel lesions
   [0648] b. Any condition suggestive of a malignant tumor including but not limited to anorexia, cachexia, weight loss, fever, hypercalcemia, skeletal or abdominal pain, paraneoplastic syndrome.
   [0649] c. Ascites.
[0650] 7. Prediction of patient's drug response
[0651] 8. As surrogate markers for clinical outcome of a treated cancer.

### Breast Cancer

[0652] Breast cancer is the most commonly occurring cancer in women, comprising almost a third of all malignancies in females. In one embodiment, the polypeptides and/or polynucleotides of this invention are utilized alone, or in combination with other markers, for the diagnosis, treatment or assessment of prognosis of breast cancer. In one embodiment, the polypeptides and/or polynucleotides serve as markers of disease.

[0653] Such markers may be used alone, or in combination with other known markers for breast cancer, including, inter alia, Mucin1 (measured as CA 15-3), CEA (CarcinoEmbryonic Antigen), HER-2, CA125, CA 19-9, PCNA, Ki-67, E-Cadherin, Cathepsin D, TFF1, epidermal growth factor receptor (EGFR), cyclin E, p53, bcl-2, vascular endothelial growth factor, urokinase-type plasminogen activator-1, survivin, or any combination thereof, and includes use of any compound which detects or quantifies the same. ESR (Erythrocyte Sedimentation Rate) values may be obtained, and comprise the marker panel for breast cancer.

[0654] In some embodiments, the polypeptides/polynucleotides of this invention serve as prognosticators, in identifying, inter alia, patients at minimal risk of relapse, patients with a worse prognosis, or patients likely to benefit from specific treatments.

[0655] There are some non-cancerous pathological conditions which represent an increased risk factor for development breast cancer, and as such, patients with these conditions may be evaluated using the polypeptides/polynucleotides and according to the methods of this invention, for example, as part of the screening methods of this invention, Some of these conditions include, but are not limited to ductal hyperplasia without atypia, atypical hyperplasia, and others.

[0656] In some embodiments, the polypeptides/polynucleotides of this invention serve as markers for breast cancer, including, but not limited to: AA383349, H13410, H61775, T86235, N31842 or homologues thereof. In some embodiments, the AA383349, H13410, H61775, T86235, N31842 or polynucleotides encoding the same, can be used alone or in combination with any other desired marker, including, inter alia, Calcitonin, CA15-3 (Mucin1), CA27-29, TPA, a combination of CA 15-3 and CEA, CA 27.29 (monoclonal antibody directed against MUC1), Estrogen 2 (beta), HER-2 (c-erbB2), or any combinations thereof.

[0657] In some embodiments, the polypeptides/polynucleotides of this invention may be useful in, inter alia, assessing the presence, risk and/or extent of the following:
[0658] 1. The identification of a metastasis of unknown origin which originated from a primary breast cancer tumor.
[0659] 2. In the assessment of lymphadenopathy, and in particular axillary lymphadenopathy.
[0660] 3. As a marker to distinguish between different types of breast cancer, therefore potentially affect treatment choice (e.g. as HER-2)
[0661] 4. As a tool in the assessment of palpable breast mass and in particular in the differential diagnosis between a benign and malignant breast mass.
[0662] 5. As a tool in the assessment of conditions affecting breast skin (e.g. Paget's disease) and their differentiation from breast cancer.
[0663] 6. As a tool in the assessment of breast pain or discomfort resulting from either breast cancer or other possible conditions (e.g. Mastitis, Mondors syndrome).
[0664] 7. Other conditions not mentioned above which have similar symptoms, signs and complications as breast cancer and where the differential diagnosis between them and breast cancer is of clinical importance including but not limited to:
   [0665] a. Abnormal mammogram and/or nipple retraction and/or nipple discharge due to causes other than breast cancer. Such causes include but are not limited to benign breast masses, melanoma, trauma and technical and/or anatomical variations.
   [0666] b. Any condition suggestive of a malignant tumor including but not limited to anorexia, cachexia, weight loss, fever, hypercalcemia, paraneoplastic syndrome.

[0667] Lymphadenopathy, weight loss and other signs and symptoms associated with breast cancer but originate from diseases different from breast cancer including but not limited to other malignancies, infections and autoimmune diseases.
[0668] 8. Prediction of patient's drug response
[0669] 9. As surrogate markers for clinical outcome of a treated cancer.

### Lung Cancer

[0670] Lung cancer is the primary cause of cancer death among both men and women in the U.S. In one embodiment, the polypeptides and/or polynucleotides of this invention are utilized alone, or in combination with other markers, for the diagnosis, treatment or assessment of prognosis of lung cancer. In one embodiment, the term “lung cancer” is to be understood as encompassing small cell or non-small cell lung cancers, including adenocarcinomas, bronchoalveolar-alveolar, squamous cell and large cell carcinomas.

[0671] In some embodiments, the polypeptides/polynucleotides of this invention are utilized in conjunction with other screening procedures, as well as the use of other markers, for the diagnosis, or assessment of prognosis of lung cancer in a subject. In some embodiments, such screening procedures may comprise the use of chest x-rays, analysis of the type of cells contained in sputum, fiberoptic examination of the bronchial passages, or any combination thereof. Such evaluation in turn may impact the type of treatment regimen pursued, which in turn may reflect the type and stage of the cancer, and include surgery, radiation therapy and/or chemotherapy.

[0672] Current radiotherapeutic agents, chemotherapeutic agents and biological toxins are potent cytotoxins, yet do not discriminate between normal and malignant cells, producing adverse effects and dose-limiting toxicities. In some embodiments of this invention, the polypeptides/polynucleotides provide a means for more specific targeting to neoplastic versus normal cells.

[0673] In some embodiments, the polypeptides for use in the diagnosis, treatment and/or assessment of progression of lung cancer may comprise: AA583399, H13410, H61775, T86235, N31842, T58132 or homologoues thereof, or polynucleotides encoding the same. In some embodiments, these polypeptides/polynucleotides may be used alone or in combination with one or more other appropriate markers, including, inter alia, other polypeptides/polynucleotides of this invention. In some embodiments, such use may be in combination with other known markers for lung cancer, including but not limited to CEA, CA15-3, Beta-2-microglobulin, CA19-9, TPA, and/or in combination with native sequences associated with the polypeptides/polynucleotides of this invention, as herein described.

[0674] In some embodiments, the polypeptides/polynucleotides of this invention may be useful in, inter alia, assessing the presence, risk and/or extent of the following:
[0675] 1. The identification of a metastasis of unknown origin which originated from a primary lung cancer.
[0676] 2. The assessment of a malignant tissue residing in the lung that is from a non-lung origin, including but not limited to: osteogenic and soft tissue sarcomas; colorectal, uterine, cervix and corpus tumors; head and neck, breast, testis and salivary gland cancers; melanoma; and bladder and kidney tumors.
[0677] 3. Distinguishing between different types of lung cancer, therefore potentially affect treatment choice (e.g. small cell vs. non small cell tumors).
[0678] 4. Unexplained dyspnea and/or chronic cough and/or hemoptysis, and analysis thereof.
[0679] 5. Differential diagnosis of the origin of a pleural effusion.
[0680] 6. Conditions which have similar symptoms, signs and complications as lung cancer and where the differential diagnosis between them and lung cancer is of clinical importance including but not limited to:
   [0681] a. Non-malignant causes of lung symptoms and signs. Symptoms and signs include, but are not limited to: lung lesions and infiltrates, wheeze, stridor.
   [0682] b. Other symptoms, signs and complications suggestive of lung cancer, such as tracheal obstruction, esophageal compression, dysphagia, recurrent laryngeal nerve paralysis, hoarseness, phrenic nerve paralysis with elevation of the hemidiaphragm and Horner syndrome.
   [0683] c. Any condition suggestive of a malignant tumor including but not limited to anorexia, cachexia, weight loss, fever, hypercalcemia, hypophosphatemia, hyponatremia, syndrome of inappropriate secretion of antidiuretic hormone, elevated ANP, elevated ACTH, hypokalemia, clubbing, neurologic-myopathic syndromes and thrombophlebitis.
[0684] 7. Prediction of patient's drug response
[0685] 8. As surrogate markers for clinical outcome of a treated cancer.

### Colorectal Cancer:

[0686] Colon and rectal cancers are malignant conditions which occur in the corresponding segments of the large intestine. In one embodiment, the polypeptides and/or polynucleotides of this invention are utilized alone, or in combination with other markers, for the diagnosis, treatment or assessment of prognosis of colorectal cancer. In some embodiments, the term “colorectal cancers” is to be understood as encompassing adenocarcinomas, carcinoid tumors, for example, found in the appendix and rectum; gastrointestinal stromal tumors for example, found in connective tissue in the wall of the colon and rectum; and lymphomas, which are malignancies of immune cells in the colon, rectum and lymph nodes. In some embodiments, the polypeptides/polynucleotides are useful in diagnosing, treating and/or assessing progression of colorectal pathogenesis, including the maturation of adenomatous polyps, to larger polyps, and all relevant stages in the neoplastic transformation of the tissue.

[0687] In some embodiments, the polypeptides/polynucleotides of this invention are utilized in conjunction with other screening procedures, as well as the use of other markers, for the diagnosis, or assessment of prognosis of colorectal cancer in a subject. In some embodiments, such screening procedures may comprise fecal occult blood tests, sigmoidoscopy, barium enema X-ray, digital rectal exam, colonoscopy, detection of carcinoembryonic antigen (CEA) or combinations thereof.

[0688] In some embodiments, the polypeptides/polynucleotides are useful in assessing progression of colorectal pathogenesis. Such assessment may reflect the staging of the colorectal cancer. In some embodiments, the polypeptides/polynucleotides are useful in assessing or altering stage progression in a subject with colorectal cancer. When in reference to cancer staging, it is to be understood that any known means or classification system will apply, for any embodiment as described herein. In some embodiments, staging in reference to colorectal cancer may be via the Dukes' system and/or the International Union against Cancer-American Joint Committee on Cancer TNM staging system. Staging will reflect, in some embodiments, the extent of tumor penetration into the colon wall, with greater penetration generally correlating with a more dangerous tumor; the extent of invasion of the tumor through the colon wall and into other neighboring tissues, with greater invasion generally correlating with a more dangerous tumor; the extent of invasion of the tumor into the regional lymph nodes, and the extent of metastatic invasion into more distant tissues, such as the liver. It is to be understood that the polypeptides/polynucleotides of this invention may be useful both in the identification/assessment of colorectal cancer pathogenesis as a function of stage designation, as well as

[0689] In some embodiments, the polypeptides/polynucleotides of this invention may be useful in the diagnosis, treatment and/or assessment of prognosis of colon cancer. According to this aspect and in one embodiment, the polypeptides useful in this context are: T58132 or homologues thereof, or polynucleotides encoding the same. In some embodiments, these polypeptides/polynucleotides are used alone or in combination with one or more other polypeptides/polynucleotides of this invention, and/or in combination with other markers for colorectal cancer, including but not limited to CEA, CA19-9, CA50, and/or in combination with a native protein associated with the polypeptides of this invention, for example, native proteins of which the polypeptides are variants thereof. In some embodiments, the polypeptides/polynucleotides of this invention may be useful in, inter alia, assessing the presence, risk and/or extent of the following:
[0690] 1. Early diagnosis, staging, grading, prognosis, monitoring, and treatment of diseases associated with colon cancer, or to indicate a predisposition to such for preventative measures.
[0691] 2. The identification of a metastasis of unknown origin which originated from a primary colorectal cancer tumor, in particular when the metastasis is located in the liver, lung, bones, supraclavicluar lymph nodes or brain.
[0692] 3. In the assessment of lymphadenopathy, in particular supraclavicluar or internal abdominal lymphadenopathy.
[0693] 4. As a marker to distinguish between different types of colorectal tumors including but not limited to nonhereditary carcinoma, Familial Polyposis Coli, Hereditary nonpolyposis colon cancer (Lynch syndrome) and Carcinoid; therefore potentially affect treatment choice.
[0694] 5. In the assessment of cancer staging, in addition and as a complementary measure to the Dukes system for staging colorectal cancer.
[0695] 6. As a risk factor to the development of colorectal tumor, and in particular in diseases known to have high incidence of colorectal tumor, including but not limited to Crohn's disease and Ulcerative Colitis.
[0696] 7. As a tool in the assessment of fecal occult blood or imaging findings suspected for colorectal tumor or abnormal blood tests associated with colorectal cancer including but not limited to elevated CEA level.
[0697] 8. In the differential diagnosis between malignant and benign colorectal tumors, in particular adenomas and polyps.
[0698] 9. Other conditions not mentioned above which have similar symptoms, signs and complications as colorectal cancer and where the differential diagnosis between them and colorectal cancer is of clinical importance including but not limited to:
   [0699] a. Any condition suggestive of a malignant tumor including but not limited to anorexia, cachexia, weight loss, fever, hypercalcemia, paraneoplastic syndrome.
   [0700] b. Lymphadenopathy, weight loss and other signs and symptoms associated with colorectal cancer but originate from diseases different from colorectal cancer including but not limited to other malignancies, infections and autoimmune diseases.
[0701] 10. Prediction of patient's drug response
[0702] 11. As surrogate markers for clinical outcome of a treated cancer.
   Renal Disease, and/or Condition

[0703] In one embodiment, the polypeptides and/or polynucleotides of this invention are utilized alone, or in combination with other markers, for the diagnosis, treatment selection and monitoring, or assessment of prognosis of any type of renal disease, and/or condition including but not limited to any type of renal damage; renal cancer, including but not limited to renal cell carcinoma; polycystic kidney disease; Diabetes induced nephropathy; Chronic Kidney Disease; Total Kidney Failure; Autoimmune nephropathy, including but not limited to Systemic lupus erythematosus (SLE), Goodpasture's syndrome, IgA nephropathy; Hereditary Nephritis—(Alport Syndrome); Infection-related Glomerular Disease, including but not limited to Acute post-streptococcal glomerulonephritis (PSGN), Bacterial endocarditis, HIV; Glomerulosclerosis; Focal segmental glomerulosclerosis (FSGS); Membranous nephropathy; Minimal change disease (MCD).

[0704] In some embodiments, the polypeptides/polynucleotides of this invention are utilized in conjunction with other screening procedures, as well as the use of other markers, for the diagnosis, or assessment of prognosis of renal disease and/or in a subject. In some embodiment, such markers and/or screening procedures may comprise urinary protein, creatinine or creatinine clearance. In another embodiments, the other markers may comprise markers used for the diagnosis or assessment of prognosis of renal cancer, specifically of renal cell carcinoma, including but not limited to vascular endothelial growth factor, interleukin-12, the soluble interleukin-2 receptor, intercellular adhesion molecule-1, human chorionic gonadotropin beta, insulin-like growth factor-1 receptor, Carbonic anhydrase 9 (CA 9), endostatin, Thymidine phosphorylase or combinations thereof.

[0705] In some embodiments, the polypeptides/polynucleotides of this invention may be useful in the diagnosis, treatment and/or assessment of prognosis of renal diseases and/or conditions. According to this aspect and in one embodiment, the polypeptides/polynucleotides useful in this context are: N31842, or homologues thereof. In some embodiments, these polypeptides/polynucleotides are used alone or in combination with one or more other polypeptides/polynucleotides of this invention, and/or in combination with other markers known to detect kidney-related disorders, and/or screening procedures, including, inter alia, urinary protein, creatinine or creatinine clearance, and/or a native protein associated with the polypeptides of this invention, for example, native proteins of which the polypeptides are variants thereof.

### Candidate Markers

[0706] This section relates to examples of sequences according to the present invention, including illustrative methods of selection thereof.

[0707] It is appreciated that certain features of the invention, which are, for clarity, described in the context of separate embodiments, may also be provided in combination in a single embodiment. Conversely, various features of the invention, which are, for brevity, described in the context of a single embodiment, may also be provided separately or in any suitable subcombination.

[0708] Although the invention has been described in conjunction with specific embodiments thereof, it is evident that many alternatives, modifications and variations will be apparent to those skilled in the art. Accordingly, it is intended to embrace all such alternatives, modifications and variations that fall within the spirit and broad scope of the appended claims. All publications, patents and patent applications mentioned in this specification are herein incorporated in their entirety by reference into the specification, to the same extent as if each individual publication, patent or patent application was specifically and individually indicated to be incorporated herein by reference. In addition, citation or identification of any reference in this application shall not be construed as an admission that such reference is available as prior art to the present invention.

[0709] The markers of the present invention were tested with regard to their expression in various cancerous and non-cancerous tissue samples. Unless otherwise noted, all experimental data relates to variants of the present invention, named according to the segment being tested (as expression was tested through RT-PCR as described). A description of the samples used in the ovarian cancer testing panel is provided in Table 1_{—}1 or Table 1_{—}5 below. A description of the samples used in the lung cancer testing panel is provided in Table 1_{—}2 or Table 1_{—}6 below. A description of the samples used in the breast cancer testing panel is provided in Table 1_{—}3 or 1_{—}7 below. A description of the samples used in the colon cancer testing panel is provided in Table 1_{—}4 and 1_{—}8 below. The keys for the tables 1_{—}5, 1_{—}6, 1_{—}7 and 1_{—}8 are listed in tables 1_{—}5_{—}1, 1_{—}6_{—}1, 1_{—}7_{—}1 and 1_{—}8_{—}1, respectively. A description of the samples used in the normal tissue panel is provided in Table 1_{—}9 and 1_{—}10 below. Tests were then performed as described in the “Materials and Experimental Procedures” section below.

TABLE 1_1
Tissue samples in ovarian cancer testing panel

| Sample name | Lot number | Source | Pathology | Grade | age |
|---|---|---|---|---|---|
| 33-B-Pap Sero CystAde G1 | A503175 | BioChain | Serous papillary cystadenocarcinoma | 1 | 41 |
| 41-G-Mix Sero/Muc/Endo G2 | 98-03-G803 | GOG | Mixed epithelial cystadenocarcinoma with mucinous, | 2 | 38 |
| | | | endometrioid, squamous and papillary serous (Stage2) | | |
| 35-G-Endo Adeno G2 | 94-08-7604 | GOG | Endometrioid adenocarcinoma | 2 | 39 |
| 14-B-Adeno G2 | A501111 | BioChain | Adenocarcinoma | 2 | 41 |
| 12-B-Adeno G3 | A406023 | Biochain | Adenocarcinoma | 3 | 45 |
| 40-G-Mix Sero/Endo G2 | 95-11-G006 | GOG | Papillary serous and endometrioid cystadenocarcinoma | 2 | 49 |
| | | | (Stage3C) | | |
| 4-A-Pap CystAdeno G2 | ILS-7286 | ABS | Papillary cystadenocarcinoma | 2 | 50 |
| 3-A-Pap Adeno G2 | ILS-1431 | ABS | Papillary adenocarcinoma | 2 | 52 |
| 2-A-Pap Adeno G2 | ILS-1408 | ABS | Papillary adenocarcinoma | 2 | 53 |
| 5-G-Adeno G3 | 99-12-G432 | GOG | Adenocarcinoma (Stage3C) | 3 | 46 |
| 11-B-Adeno G3 | A407068 | Biochain | Adenocarcinoma | 3 | 49 |
| 39--G-Mix Sero/Endo G3 | 2001-12-G037 | GOG | Mixed serous and endometrioid adenocarcinoma | 3 | 49 |
| 29-G-Sero Adeno G3 | 2001-12-G035 | GOG | Serous adenocarcinoma (Stage3A) | 3 | 50 |
| 70-G-Pap Sero Adeno G3 | 95-08-G069 | GOG | Papillary serous adenocarcinoma | 3 | 50 |
| 6-A-Adeno G3 | A0106 | ABS | adenocarcinoma | 3 | 51 |
| 31-B-Pap Sero CystAde G3 | A503176 | BioChain | Serous papillary cystadenocarcinoma | 3 | 52 |
| 25-A-Pap Sero Adeno G3 | N0021 | ABS | Papillary serous adenocarcinoma (StageT3CN1MX) | 3 | 55 |
| 37-G-Mix Sero/Endo G3 | 2002-05-G513 | GOG | Mixed serous and endometrioid adenocarcinoma | 3 | 56 |
| 7-A-Adeno G3 | IND-00375 | ABS | adenocarcinoma | 3 | 59 |
| 8-B-Adeno G3 | A501113 | BioChain | adenocarcinoma | 3 | 60 |
| 10-B-Adeno G3 | A407069 | Biochain | Adenocarcinoma | 3 | 60 |
| 38-G-Mix Sero/Endo G3 | 2002-05-G509 | GOG | Mixed serous and endometrioid adenocarcinoma of mullerian | 3 | 64 |
| | | | (Stage3C) | | |
| 13-G-Adeno G3 | 94-05-7603 | GOG | Poorly differentiated adenocarcinoma from primary peritoneal | 3 | 67 |
| 24-G-Pap Sero Adeno G3 | 2001-07-G801 | GOG | Papillary serous adenocarcinoma | 3 | 68 |
| 34-G-Pap Endo Adeno G3 | 95-04-2002 | GOG | Papillary endometrioid adenocarcinoma (Stage3C) | 3 | 68 |
| 30-G-Pap Sero Adeno G3 | 2001-08-G011 | GOG | Papillary serous carcinoma (Stage1C) | 3 | 72 |
| 1-A-Pap Adeno G3 | ILS-1406 | ABS | Papillary adenocarcinoma | 3 | 73 |
| 9-G-Adeno G3 | 99-06-G901 | GOG | Adenocarcinoma (maybe serous) | 3 | 84 |
| 32-G-Pap Sero CystAde G3 | 93-09-4901 | GOG | Serous papillary cystadenocarcinoma | 3 | 67 |
| 66-G-Pap Sero Adeno G3 SIV | 2000-01-G413 | GOG | Papillary serous carcinoma (metastais of primary | 3 | 67 |
| | | | peritoneum) (Stage4) | | |
| 19-B-Muc Adeno G3 | A504085 | BioChain | Mucinous adenocarcinoma | 3 | 34 |
| 21-G-Muc CystAde G2-3 | 95-10-G020 | GOG | Mucinous cystadenocarcinoma (Stage2) | 2-3 | 44 |
| 18-B-Muc Adeno G3 | A504083 | BioChain | Mucinous adenocarcinoma | 3 | 45 |
| 20-A-Pap Muc CystAde | USA-00273 | ABS | Papillary mucinous cystadenocarcinoma | | 46 |
| 17-B-Muc Adeno G3 | A504084 | BioChain | Mucinous adenocarcinoma | 3 | 51 |
| 22-A-Muc CystAde G2 | A0139 | ABS | Mucinous cystadenocarcinoma (Stage1C) | 2 | 72 |
| 43-G-Clear cell Adeno G3 | 2001-10-G002 | GOG | Clear cell adenocarcinoma | 3 | 74 |
| 44-G-Clear cell Adeno | 2001-07-G084 | GOG | Clear cell adenocarcinoma (Stage3A) | | 73 |
| 15-B-Adeno G3 | A407065 | BioChain | Carcinoma | 3 | 27 |
| 16-Ct-Adeno | 1090387 | Clontech | Carcinoma NOS | NA | 58 |
| 23-A-Muc CystAde G3 | VNM-00187 | ABS | Mucinous cystadenocarcinoma with low malignant | 3 | 45 |
| 42-G-Adeno borderline | 98-08-G001 | GOG | Epithelial adenocarcinoma of borderline malignancy | | 46 |
| 63-G-Sero CysAdenoFibroma | 2000-10-G620 | GOG | Serous CysAdenoFibroma of borderline malignancy | | 71 |
| 62-G-Ben Muc CysAdenoma | 99-10-G442 | GOG | Benbin mucinus cysadenoma | | 32 |
| 60-G-Muc CysAdenoma | 99-01-G043 | GOG | Mucinous Cysadenoma | | 40 |
| 56-G-Ben Muc CysAdeno | 99-01-G407 | GOG | Bengin mucinus cysadenoma | | 46 |
| 64-G-Ben Sero CysAdenoma | 99-06-G039 | GOG | Bengin Serous CysAdenoma | | 57 |
| 61-G-Muc CysAdenoma | 99-07-G011 | GOG | Mucinous Cysadenoma | | 63 |
| 59-G-Sero CysAdenoFibroma | 98-12-G401 | GOG | Serous CysAdenoFibroma | | 77 |
| 51-G-N M41 | 98-03-G803N | GOG | Normal (matched tumor 98-03-G803) | | 38 |
| 75-G-N M60 | 99-01-G043N | GOG | Normal (matched tumor 99-01-G043) | | 40 |
| 49-B-N M14 | A501112 | BioChain | Normal (matched tumor A501111) | | 41 |
| 52-G-N M42 | 98-08-G001N | GOG | Normal (matched tumor 98-08-G001) | | 46 |
| 68-G-N M56 | 99-01-G407N | GOG | Normal (matched bengin 99-01-G407) | | 46 |
| 50-B-N M8 | A501114 | BioChain | Normal (matched tumor A501113) | | 60 |
| 67-G-N M38 | 2002-05-509N | GOG | Normal (matched tumor 2002-05-G509) | | 64 |
| 69-G-N M24 | 2001-07- | GOG | Normal (matched tumor 2001-07-G801) | | 68 |
| | G801N | | | | |
| 73-G-N M59 | 98-12-G401N | GOG | Normal (matched tumor 98-12-G401) | | 77 |
| 72-G-N M66 | 2000-01- | GOG | Normal (matched tumor 2000-01-G413) | | |
| | G413N | | | | |
| 45-B-N | A503274 | BioChain | Normal PM | | 41 |
| 46-B-N | A504086 | BioChain | Normal PM | | 41 |
| 71-CG-N | CG-188-7 | Ichilov | Normal PM | | 49 |
| 48-B-N | A504087 | BioChain | Normal PM | | 51 |

TABLE 1_2
Tissue samples in lung cancer testing panel

| sample name | Lot No. | source | pathology | Grade | gender/age |
|---|---|---|---|---|---|
| 1-B-Adeno G1 | A504117 | Biochain | Adenocarcinoma | 1 | F/29 |
| 2-B-Adeno G1 | A504118 | Biochain | Adenocarcinoma | 1 | M/64 |
| 95-B-Adeno G1 | A610063 | Biochain | Adenocarcinoma | 1 | F/54 |
| 12-B-Adeno G2 | A504119 | Biochain | Adenocarcinoma | 2 | F/74 |
| 75-B-Adeno G2 | A609217 | Biochain | Adenocarcinoma | 2 | M/65 |
| 77-B-Adeno G2 | A608301 | Biochain | Adenocarcinoma | 2 | M/44 |
| 13-B-Adeno G2-3 | A504116 | Biochain | Adenocarcinoma | 2-3 | M/64 |
| 89-B-Adeno G2-3 | A609077 | Biochain | Adenocarcinoma | 2-3 | M/62 |
| 76-B-Adeno G3 | A609218 | Biochain | Adenocarcinoma | 3 | M/57 |
| 94-B-Adeno G3 | A610118 | Biochain | Adenocarcinoma | 3 | M/68 |
| 3-CG-Adeno | CG-200 | Ichilov | Adenocarcinoma | | NA |
| 14-CG-Adeno | CG-111 | Ichilov | Adenocarcinoma | | M/68 |
| 15-CG-Bronch adeno | CG-244 | Ichilov | Bronchioloalveolar adenocarcinoma | | M/74 |
| 45-B-Alvelous Adeno | A501221 | Biochain | Alveolus carcinoma | | F/50 |
| 44-B-Alvelous Adeno G2 | A501123 | Biochain | Alveolus carcinoma | 2 | F/61 |
| 19-B-Squamous G1 | A408175 | Biochain | Squamous carcinoma | 1 | M/78 |
| 16-B-Squamous G2 | A409091 | Biochain | Squamous carcinoma | 2 | F/68 |
| 17-B-Squamous G2 | A503183 | Biochain | Squamous carcinoma | 2 | M/57 |
| 21-B-Squamous G2 | A503187 | Biochain | Squamous carcinoma | 2 | M/52 |
| 78-B-Squamous G2 | A607125 | Biochain | Squamous Cell Carcinoma | 2 | M/62 |
| 80-B-Squamous G2 | A609163 | Biochain | Squamous Cell Carcinoma | 2 | M/74 |
| 18-B-Squamous G2-3 | A503387 | Biochain | Squamous Cell Carcinoma | 2-3 | M/63 |
| 81-B-Squamous G3 | A609076 | Biochain | Squamous Carcinoma | 3 | m/53 |
| 79-B-Squamous G3 | A609018 | Biochain | Squamous Cell Carcinoma | 3 | M/67 |
| 20-B-Squamous | A501121 | Biochain | Squamous Carcinoma | | M/64 |
| 22-B-Squamous | A503386 | Biochain | Squamous Carcinoma | | M/48 |
| 88-B-Squamous | A609219 | Biochain | Squamous Cell Carcinoma | | M/64 |
| 100-B-Squamous | A409017 | Biochain | Squamous Carcinoma | | M/64 |
| 23-CG-Squamous | CG-109 (1) | Ichilov | Squamous Carcinoma | | M/65 |
| 24-CG-Squamous | CG-123 | Ichilov | Squamous Carcinoma | | M/76 |
| 25-CG-Squamous | CG-204 | Ichilov | Squamous Carcinoma | | M/72 |
| 87-B-Large cell G3 | A609165 | Biochain | Large Cell Carcinoma | 3 | F/47 |
| 38-B-Large cell | A504113 | Biochain | Large cell | | M/58 |
| 39-B-Large cell | A504114 | Biochain | Large cell | | F/35 |
| 82-B-Large cell | A609170 | Biochain | Large Cell Neuroendocrine Carcinoma | | M/68 |
| 30-B-Small cell carci G3 | A501389 | Biochain | small cell | 3 | M/34 |
| 31-B-Small cell carci G3 | A501390 | Biochain | small cell | 3 | F/59 |
| 32-B-Small cell carci G3 | A501391 | Biochain | small cell | 3 | M/30 |
| 33-B-Small cell carci G3 | A504115 | Biochain | small cell | 3 | M |
| 86-B-Small cell carci G3 | A608032 | Biochain | Small Cell Carcinoma | 3 | F/52 |
| 83-B-Small cell carci | A609162 | Biochain | Small Cell Carcinoma | | F/47 |
| 84-B-Small cell carci | A609167 | Biochain | Small Cell Carcinoma | | F/59 |
| 85-B-Small cell carci | A609169 | Biochain | Small Cell Carcinoma | | M/66 |
| 46-B-N M44 | A501124 | Biochain | Normal M44 | | F/61 |
| 47-B-N | A503205 | Biochain | Normal PM | | M/26 |
| 48-B-N | A503206 | Biochain | Normal PM | | M/44 |
| 49-B-N | A503384 | Biochain | Normal PM | | M/27 |
| 50-B-N | A503385 | Biochain | Normal PM | | M/28 |
| 90-B-N | A608152 | Biochain | Normal (Pool 2) PM | | pool 2 |
| 91-B-N | A607257 | Biochain | Normal (Pool 2) PM | | pool 2 |
| 92-B-N | A503204 | Biochain | Normal PM | | m/28 |
| 93-Am-N | 111P0103A | Ambion | Normal PM | | F/61 |
| 96-Am-N | 36853 | Ambion | Normal PM | | F/43 |
| 97-Am-N | 36854 | Ambion | Normal PM | | M/46 |
| 98-Am-N | 36855 | Ambion | Normal PM | | F/72 |
| 99-Am-N | 36856 | Ambion | Normal PM | | M/31 |

TABLE 1_3
Tissue samples in breast cancer testing panel

| sample name | Lot no | source | pathology | grade | age | TNM | stage |
|---|---|---|---|---|---|---|---|
| 14-A-IDC G2 | A0135T | ABS | IDC | 2 | 37 | T2N2Mx | |
| 43-B-IDC G2 | A609183 | Biochain | IDC | 2 | 40 | | |
| 54-B-IDC G2 | A605353 | Biochain | IDC | 2 | 41 | | |
| 55-B-IDC G2 | A609179 | Biochain | IDC | 2 | 42 | | |
| 47-B-IDC G2 | A609221 | Biochain | IDC | 2 | 42 | | |
| 17-A-IDC G2 | 4904020036T | ABS | IDC | 2-3 | 42 | T3N1Mx | |
| 42-A-IDC G3 | 6005020031T | ABS | IDC | 3 | 42 | T1cN0Mx | |
| 7-A-IDC G2 | 7263T | ABS | IDC | 2 | 43 | T1N0M0 | stage 1 |
| 48-B-IDC G2 | A609222 | Biochain | IDC | 2 | 44 | | |
| 53-B-IDC G2 | A605151 | Biochain | IDC | 2 | 44 | | |
| 12-A-IDC G2 | 1432T | ABS | IDC | 2 | 46 | T2N0M0 | stage 2A |
| 61-B-IDC G2 | A610029 | Biochain | IDC | 2 | 46 | | |
| 46-B-Carci G2 | A609177 | Biochain | Carcinoma | 2 | 48 | | |
| 16-A-IDC G2 | 4904020032T | ABS | IDC | 2 | 49 | T3N1Mx | |
| 62-B-IDC G2 | A609194 | Biochain | IDC | 2 | 51 | | |
| 49-B-IDC G2 | A609223 | Biochain | IDC | 2 | 54 | | |
| 32-A-Muc Carci | 7116T | ABS | Mucinous carcinoma | | 54 | T2N0M0 | stage 2A |
| 45-B-IDC G2 | A609181 | Biochain | IDC | 2 | 58 | | |
| 15-A-IDC G2 | 7259T | ABS | IDC | 2 | 59 | T3N1M0 | stage 3A |
| 52-B-ILC G1 | A605360 | Biochain | Invasive Lobular Carcinoma | 1 | 60 | | |
| 6-A-IDC G1 | 7238T | ABS | IDC | 1 | 60 | T2N0M0 | stage 2A |
| 26-A-IDC G3 | 7249T | ABS | IDC | 3 | 60 | T2N0M0 | stage 2A |
| 13-A-IDC G2 | A0133T | ABS | IDC | 2 | 63 | T2N1aMx | |
| 50-B-IDC G2 | A609224 | Biochain | IDC | 2 | 69 | | |
| 44-B-IDC G2 | A609198 | Biochain | IDC | 2 | 77 | | |
| 51-B-IDC G1 | A605361 | Biochain | IDC | 1 | 79 | | |
| 31-CG-IDC | CG-154 | Ichilov | IDC | | 83 | | |
| 27-A-IDC G3 | 4907020072T | ABS | IDC | 3 | 91 | T2N0Mx | |
| 36-A-N M7 | 7263N | ABS | Normal matched to 7T | | 43 | | |
| 40-A-N M12 | 1432N | ABS | Normal matched to 12T | | 46 | | |
| 39-A-N M15 | 7259N | ABS | Normal matched to 15T | | 59 | | |
| 35-A-N M6 | 7238N | ABS | Normal matched to 6T | | 60 | | |
| 41-A-N M26 | 7249N | ABS | Normal matched to 26T | | 60 | | |
| 57-B-N | A609233 | Biochain | Normal PM | | 34 | | |
| 59-B-N | A607155 | Biochain | Normal PM | | 35 | | |
| 60-B-N | A609234 | Biochain | Normal PM | | 36 | | |
| 63-Am-N | 26486 | Ambion | Normal PS | | 43 | | |
| 66-Am-N | 36678 | Ambion | Normal PM | | 45 | | |
| 64-Am-N | 23036 | Ambion | Normal PM | | 57 | | |
| 56-B-N | A609235 | Biochain | Normal PM | | 59 | | |
| 65-Am-N | 31410 | Ambion | Normal PM | | 63 | | |
| 67-Am-N | 073P010602086A | Ambion | Normal PM | | 64 | | |
| 58-B-N | A609232 | Biochain | Normal PM | | 65 | | |

TABLE 1_4
Tissue samples in colon cancer testing panel

| sample name | Lot No. | tissue | source | pathology | Grade | gender/age |
|---|---|---|---|---|---|---|
| 58-B-Adeno G1 | A609152 | Colon | biochain | Adenocarcinoma | 1 | M/73 |
| 59-B-Adeno G1 | A609059 | Colon | biochain | Adenocarcinoma, Ulcer | 1 | M/58 |
| 14-CG-Polypoid Adeno G1 | CG-222 (2) | Rectum | Ichilov | Well polypoid adeocarcinoma Duke's C | | F/49 |
| D-C | | | | | | |
| 17-CG-Adeno G1-2 | CG-163 | Rectum | Ichilov | Adenocarcinoma | 2 | M/73 |
| 10-CG-Adeno G1-2 D-B2 | CG-311 | Sigmod colon | Ichilov | Adenocarcinoma Astler-Coller B2. | 1-2 | M/88 |
| 11-CG-Adeno G1-2 D-C2 | CG-337 | Colon | Ichilov | Adenocarcinoma Astler-Coller C2. | 1-2 | NA |
| 6-CG-Adeno G1-2 D-C2 | CG-303 (3) | Colon | Ichilov | Adenocarcinoma Astler-Coller C2. | 1-2 | F/77 |
| 5-CG-Adeno G2 | CG-308 | Colon Sigma | Ichilov | Adenocarcinoma. | 2 | F/80 |
| 16-CG-Adeno G2 | CG-278C | colon | Ichilov | Adenocarcinoma | 2 | F/60 |
| 56-B-Adeno G2 | A609148 | Colon | biochain | Adenocarcinoma | 2 | F48 |
| 61-B-Adeno G2 | A606258 | Colon | biochain | Adenocarcinoma, Ulcer | 2 | M/41 |
| 60-B-Adeno G2 | A609058 | Colon | biochain | Adenocarcinoma, Ulcer | 2 | M/67 |
| 22-CG-Adeno G2 D-B | CG-229C | Colon | Ichilov | Adenocarcinoma Duke's B | 2 | F/55 |
| 1-CG-Adeno G2 D-B2 | CG-335 | Cecum | Ichilov | Adenocarcinoma Dukes B2. | 2 | F/66 |
| 12-CG-Adeno G2 D-B2 | CG-340 | Colon Sigma | Ichilov | Adenocarcinoma Astler-Coller B2. | 2 | M/66 |
| 28-CG-Adeno G2 D-B2 | CG-284 | sigma | Ichilov | Adenocarcinoma Duke's B2 | 2 | F/72 |
| 2-CG-Adeno G2 D-C2 | CG-307 X2 | Cecum | Ichilov | Adenocarcinoma Astler-Coller C2. | 2 | F/89 |
| 9-CG-Adeno G2 D-D | CG-297 X2 | Rectum | Ichilov | Adenocarcinoma Dukes D. | 2 | M/62 |
| 13-CG-Adeno G2 D-D | CG-290 X2 | Rectosigmoidal | Ichilov | Adenocarcinoma Dukes D. | 2 | M/47 |
| | | colon | | | | |
| 26-CG-Adeno G2 D-D | CG-283 | sigma | Ichilov | Colonic adenocarcinoma Duke's D | 2 | F/63 |
| 4-CG-Adeno G3 | CG-276 | Colon | Ichilov | Carcinoma. | 3 | M/64 |
| 53-B-Adeno G3 | A609161 | Colon | biochain | Adenocarcinoma | 3 | F/53 |
| 54-B-Adeno G3 | A609142 | Colon | biochain | Adenocarcinoma | 3 | M/53 |
| 55-B-Adeno G3 | A609144 | Colon | biochain | Adenocarcinoma | 3 | M/68 |
| 57-B-Adeno G3 | A609150 | Colon | biochain | Adenocarcinoma | 3 | F/45 |
| 72-CG-Adeno G3 | CG-309 | colon | Ichilov | Adenocarcinoma | 3 | F/88 |
| 20-CG-Adeno G3 D-B2 | CG-249 | Colon | Ichilov | Ulcerated adenocarcinoma Duke's B2 | 3 | M/36 |
| 7-CG-Adeno D-A | CG-235 | Rectum | Ichilov | Adenocarcinoma intramucosal Duke's A. | | F/66 |
| 23-CG-Adeno D-C | CG-282 | sigma | Ichilov | Mucinus adenocarcinoma Astler Coller C | | M/51 |
| 3-CG-Muc adeno D-D | CG-224 | Colon | Ichilov | Mucinois adenocarcinoma Duke's D | | M/48 |
| 18-CG-Adeno | CG-22C | Colon | Ichilov | Adenocarcinoma | | NA |
| 19-CG-Adeno | CG-19C (1) | Colon | Ichilov | Adenocarcinoma | | NA |
| 21-CG-Adeno | CG-18C | Colon | Ichilov | Adenocarcinoma | | NA |
| 24-CG-Adeno | CG-12 (2) | Colon | Ichilov | Adenocarcinoma | | NA |
| 25-CG-Adeno | CG-2 | Colon | Ichilov | Adenocarcinoma | | NA |
| 27-CG-Adeno | CG-4 | Colon | Ichilov | Adenocarcinoma | | NA |
| 8-CG-diverticolosis, | CG-291 | Wall of sigma | Ichilov | Diverticolosis and diverticulitis of the Colon | | F/65 |
| diverticulitis | | | | | | |
| 46-CG-Crohn's disease | CG-338C | Cecum | Ichilov | Crohn's disease | | M/22 |
| 47-CG-Crohn's disease | CG-338AC | Colon | Ichilov | Crohn's disease. | | M/22 |
| 42-CG-N M20 | CG-249N | Colon | Ichilov | Normal | | M/36 |
| 43-CG-N M8 | CG-291N | Wall of sigma | Ichilov | Normal | | F/65 |
| 44-CG-N M21 | CG-18N | Colon | Ichilov | Normal | | NA |
| 45-CG-N M11 | CG-337N | Colon | Ichilov | Normal | | M/75 |
| 49-CG-N M14 | CG-222N | Rectum | Ichilov | Normal | | F/49 |
| 50-CG-N M5 | CG-308N | Sigma | Ichilov | Within normal limits | | F/80 |
| 51-CG-N M26 | CG-283N | Sigma | Ichilov | Normal | | F/63 |
| 41-B-N | A501156 | Colon | biochain | Normal PM | | M/78 |
| 52-CG-N | CG-309TR | Colon | Ichilov | Within normal limits | | F/88 |
| 62-B-N | A608273 | Colon | biochain | Normal PM | | M/66 |
| 63-B-N | A609260 | Colon | biochain | Normal PM | | M/61 |
| 64-B-N | A609261 | Colon | biochain | Normal PM | | F/68 |
| 65-B-N | A607115 | Colon | biochain | Normal PM | | M/24 |
| 66-B-N | A609262 | Colon | biochain | Normal PM | | M/58 |
| 67-B-N | A406029 | Colon | biochain | Normal PM (Pool of 10) | | |
| 69-B-N | A411078 | Colon | biochain | Normal PM (Pool of 10) | | F&M |
| 70-Cl-N | 1110101 | Colon | clontech | Normal PM (Pool of 3) | | |
| 71-Am-N | 071P10B | Colon | Ambion | Normal (IC BLEED) | | F/34 |

TABLE 1_5
Tissue samples in ovarian cancer testing panel

| sample_id | | | | | | | | | | |
|---|---|---|---|---|---|---|---|---|---|---|
| (GCI)/case | | | | | | | | | | |
| id | RNA | | | | | | | | | |
| (Asterand)/ | ID | | | | | | | | | |
| lot | (GCI)/ | | | | | | | | | |
| no. | Sample | | | | | | | | | |
| (old | ID | | C | | | Ethnic | | Menopausal | Mens | Preg |
| samples) | (Asterand) | Diag | Stage | Tumor % | age | BG | CA125PRE | Status | Age | Times |
| 23074 | 71900A2 | SA | I | 80 | 49 | CAU | | Pre-M | | 2 |
| 22653 | 70270A1 | SA | I | 90 | 69 | WCAU | | Post-M | | 1 |
| 18700 | 40771B1 | SA | IB | 100 | 62 | WCAU | | Post-M | | 3 |
| 93-09-4901 | | SPC | 1B | | 67 | | | | | |
| 17646 | 32667B1 | SA | IB | 100 | 68 | W | | Post-M | | 9 |
| 15644 | 22996A1 | SA | IC | 100 | 48 | CAU | | M | | 4 |
| 18701 | 40773C1 | SA | IIA | 100 | 59 | CAU | | Post-M | | 1 |
| 2O37O | | SA | IIB | 75 | 43 | WCAU | — | Pre-M | 12 | 0 |
| 7B3DP | | SA | IIB | 70 | 70 | WCAU | — | Post-M | 14 | 5 |
| 2001-08-G011 | | PSC | 3A | | 72 | | | | | |
| 95-08-G069 | | PSA | 3B | | 50 | | | | | |
| 99-12-G432 | | A | 3C | | 46 | | >500 | | | |
| 13268 | 19832A1 | SA | IIIC | 90 | 48 | C | | Post-M | | |
| 2001-12-G035 | | SA | 3C | | 50 | | 260 | | | |
| 3NTIS | | SA | IIIC | 70 | 53 | WCAU | 70 | Post-M | 12 | 1 |
| CEJUS | | SA | IIIC | 70 | 53 | WCAU | 4814 | Pre-M | — | 2 |
| 5NCLK | | SA | IIIC | 70 | 54 | WCAU | 209 | Post-M | 13 | 2 |
| N0021 | | PSA | 3C | | 55 | AU | | | | |
| 1HI5H | | SA | IIIC | 90 | 61 | WCAU | 34 | Post-M | 12 | 6 |
| 7RMHZ | | SA | IIIC | 80 | 63 | WCAU | — | Post-M | 12 | 2 |
| 4WAAB | | SA | IIIC | 90 | 63 | WCAU | — | Post-M | 11 | 2 |
| 79Z67 | | SA | IIIC | 85 | 67 | WCAU | — | Post-M | 12 | 6 |
| 94-05-7603 | | APP | 3C | | 67 | | | | | |
| DDSNL | | SA | IIIC | 70 | 68 | WCAU | — | Post-M | 11 | 4 |
| DH8PH | | SA | IV | 95 | 70 | WCAU | — | Post-M | 13 | 4 |
| A503175 | | SPC | | | 41 | Asian | | | | |
| A501111 | | A | | | 41 | Asian | | | | |
| A406023 | | A | | | 45 | Asian | | | | |
| A407068 | | A | | | 49 | Asian | | | | |
| ILS-7286 | | PC | UN | | 50 | Asian | | | | |
| A0106 | | A | UN | | 51 | Asian | | | | |
| ILS-1431 | | PA | UN | | 52 | Asian | | | | |
| A503176 | | SPC | | | 52 | Asian | | | | |
| ILS-1408 | | PA | UN | | 53 | Asian | | | | |
| IND-00375 | | A | | | 59 | Asian | | | | |
| A501113 | | A | | | 60 | Asian | | | | |
| A407069 | | A | | | 60 | Asian | | | | |
| ILS-1406 | | PA | UN | | 73 | Asian | | | | |
| E2WKF | | EA | IA | 70 | 30 | WCAU | — | Pre-M | 12 | 6 |
| 5895C | | EA | IA | 95 | 39 | WCAU | — | Pre-M | 14 | 2 |
| 533DX | | EA | IA | 95 | 50 | WCAU | 190 | Pre-M | 11 | 0 |
| HZ2EY | | EA | IA | 90 | 55 | WCAU | 1078 | Pre-M | 13 | 0 |
| RWOIV | | EA | IA | 65 | 47 | WCAU | 1695 | Pre-M | 14 | 0 |
| 1U52X | | EA | IIA | 95 | 61 | WCAU | 275 | | — | — |
| A17WS | | EA | IIB | 70 | 67 | WCAU | 78 | Post-M | 14 | 0 |
| 1VT3I | | EA | IIIC | 90 | 50 | WCAU | — | Pre-M | 12 | 2 |
| PZQXH | | EA | IIIC | 80 | 52 | WCAU | — | Pre-M | 11 | 0 |
| I8VHZ | | EA | IV | 90 | 68 | WCAU | — | Post-M | — | 2 |
| 98-03-G803 | | Mixed . . . | 2 | | 38 | | >35 | | | |
| 95- | | PS & | 3C | | 49 | | | | | |
| 11-G006 | | EC | | | | | | | | |
| 2002- | | MS & | 3C | | 56 | | | | | |
| 05-G513 | | EA | | | | | | | | |
| 2002- | | MS & | 3C | | 64 | | | | | |
| 05-G509 | | EAM | | | | | | | | |
| 95- | | PEA | 3C | | 68 | | | | | |
| 04-2002 | | | | | | | | | | |
| 95- | | MC | IA | | 44 | | | >100 | | |
| 10-G020 | | | | | | | | | | |
| IMDA1 | | MA | IC | 70 | 41 | WCAU | 50 | Pre-M | 12 | 2 |
| 12742 | 18920A1 | MA | IC | 70 | 61 | C | | Post-M | | 3 |
| A0139 | | MC | IC | | 72 | Asian | | | | |
| NJM4U | | MA | IIA | 80 | 51 | WCAU | | | | |
| USA- | | PMC | IIIA | | 45 | C | | | | |
| 00273 | | | | | | | | | | |
| RAFCW | | MA | IIIA | 75 | 55 | WCAU | 95 | Post-M | 13 | 4 |
| 23177 | 72888A1 | MA | IIIC | 60 | 52 | C | | Pre-M | | |
| 16103 | 29374B1 | MA | IIIC | 100 | 62 | W | | Post-M | | 1 |
| A504085 | | MA | | | 34 | Asian | | | | |
| A504083 | | MA | | | 45 | Asian | | | | |
| A504084 | | MA | | | 51 | Asian | | | | |
| A407065 | | C | | | 27 | Asian | | | | |
| 1090387 | | CNOS | | | 58 | Asian | | | | |
| 2001-07-G084 | | CCA | 1A | | 73 | | | | | |
| 2001- | | CCA | 3A | | 74 | | Slightly | | | |
| 10-G002 | | | | | | | elevateed | | | |
| SC656 | | MBT | IA | 75 | 40 | WCAU | 138 | Pre-M | 13 | 2 |
| 3D5FO | | MBT | IA | 85 | 51 | WCAU | 19 | ? | 15 | 0 |
| 7JP3F | | MBT | IA | 75 | 56 | WCAU | 125 | Post-M | 14 | 3 |
| VNM- | | MC | | | 45 | Asian | | | | |
| 00187 | | Low M | | | | | | | | |
| 98- | | EA | 1A | | 46 | | | | | |
| 08- | | of | | | | | | | | |
| G001 | | BM | | | | | | | | |
| 99- | | BMC | | | 32 | | 6 | | | |
| 10-G442 | | | | | | | | | | |
| QLIKY | | BMC | | 100 | 42 | WCAU | | | | |
| 16870 | 30534A1 | BMC | | 100 | 45 | W | | Pre-M | | 2 |
| 99- | | BMC | | | 46 | | | | | |
| 01-G407 | | | | | | | | | | |
| 943EC | | BMC | | 75 | 54 | WCAU | | | | |
| JO8W7 | | BMC | | 50 | 56 | WCAU | | | | |
| 17016 | 30645B1 | BSC | IA | 100 | 38 | C | | Pre-M | | 2 |
| 99- | | BSC | | | 57 | | | | | |
| 06-G039 | | | | | | | | | | |
| DQQ2F | | BSCF | | 95 | 68 | WCAU | | | | |
| 8786 | 8275A1 | BSC | | 100 | 80 | CAU | | Post-M | | 10 |
| 15690 | 23054A1 | NO- | | | 52 | CAU | | Pre-M | | 10 |
| | | BM | | | | | | | | |
| 16843 | 30488A1 | NO- | | | 57 | W | | Post-M | | 4 |
| | | BM | | | | | | | | |
| 16850 | 30496B1 | NO- | | | 65 | W | | Post-M | | 2 |
| | | BM | | | | | | | | |
| 16848 | 30499C1 | NO- | | | 66 | CAU | | Post-M | | 9 |
| | | BM | | | | | | | | |
| WPU1U | | NO- | | 0 | 32 | WC | | | | |
| | | PS | | | | | | | | |
| Y9VHI | | NO- | | 0 | 35 | WCAU | | | | |
| | | PS | | | | | | | | |
| 76VM9 | | NO- | | 0 | 41 | WCAU | | | | |
| | | PS | | | | | | | | |
| DWHTZ | | NO- | | 0 | 42 | WCAU | | | | |
| | | PS | | | | | | | | |
| SJ2R2 | | NO- | | 0 | 43 | WCAU | | | | |
| | | PS | | | | | | | | |
| 9RQMN | | NO- | | 0 | 45 | WCAU | | | | |
| | | PS | | | | | | | | |
| TOAE5 | | NO- | | 0 | 45 | WCAU | | | | |
| | | PS | | | | | | | | |
| TW9PM | | NO- | | 0 | 46 | WCAU | | | | |
| | | PS | | | | | | | | |
| 2VND2 | | NO- | | 0 | 46 | WCAU | | | | |
| | | PS | | | | | | | | |
| L629F | | NO- | | 0 | 47 | WCAU | | | | |
| | | PS | | | | | | | | |
| XLB23 | | NO- | | 0 | 47 | WCAU | | | | |
| | | PS | | | | | | | | |
| IDUVY | | NO- | | 0 | 47 | WCAU | | | | |
| | | PS | | | | | | | | |
| ZCXAD | | NO- | | 0 | 48 | WCAU | | | | |
| | | PS | | | | | | | | |
| PEQ6C | | NO- | | 0 | 49 | WCAU | | | | |
| | | PS | | | | | | | | |
| DD73B | | NO- | | 0 | 49 | WCAU | | | | |
| | | PS | | | | | | | | |
| E2UF7 | | NO- | | 0 | 53 | WCAU | | | | |
| | | PS | | | | | | | | |
| GWXUZ | | NO- | | 0 | 53 | WCAU | | | | |
| | | PS | | | | | | | | |
| 4YG5P | | NO- | | 0 | 55 | WCAU | | | | |
| | | PS | | | | | | | | |
| FDPL9 | | NO- | | 0 | 56 | WCAU | | | | |
| | | PS | | | | | | | | |
| A503274 | | NO- | | | 41 | Asian | | | | |
| | | PM | | | | | | | | |
| A504086 | | NO- | | | 41 | Asian | | | | |
| | | PM | | | | | | | | |
| CG- | | NO- | | | 49 | | | | | |
| 188-7 | | PM | | | | | | | | |
| A504087 | | NO- | | | 51 | Asian | | | | |
| | | PM | | | | | | | | |

| sample_id | | | | | | | | | | |
|---|---|---|---|---|---|---|---|---|---|---|
| (GCI)/case | | | | | | | | | | |
| id | | | | | | | | | | |
| (Asterand)/ | | | | | | | | | | |
| lot | | Age | | | | | | | | |
| no. | | at | | Oral | Oral | | | | | |
| (old | Preg | first | | Con | Con | Tubal | WT | HT | | Recovery |
| samples) | Toterm | child | OC | Length | Unit | ligation | (KG) | (CM) | BMI | Type |
| 23074 | 1 | | | | | | 82 | 169 | 28.7 | Surg |
| 22653 | 1 | | | | | | 80 | 167 | 28.7 | Surg |
| 18700 | 3 | | | | | | 72 | 160 | 28.1 | Surg |
| 93-09-4901 | | | | | | | | | | |
| 17646 | 2 | | | | | | 76 | 164 | 28.3 | Surg |
| 15644 | 2 | | | | | | 62 | 167 | 22 | Surg |
| 18701 | 1 | | | | | | 72 | 167 | 25.8 | Surg |
| 2O37O | 0 | 0 | NO | — | | NO | 90.7 | 168 | 32.3 | Surg |
| 7B3DP | 3 | 20 | YES | 6 | months | NO | 77.1 | 168 | 27.4 | Surg |
| 2001-08-G011 | | | | | | | | | | |
| 95-08-G069 | | | | | | | | | | |
| 99-12-G432 | | | | | | | | | | |
| 13268 | | | | | | | 72 | 168 | 25.5 | Surg |
| 2001-12-G035 | | | | | | | | | | |
| 3NTIS | 1 | 26 | YES | 3 | months | NO | 93.4 | 175 | 30.4 | Surg |
| CEJUS | 2 | 30 | NO | — | | NO | 88 | 165 | 32.3 | Surg |
| 5NCLK | 2 | 21 | YES | 1 | years | NO | 71.7 | 170 | 24.7 | Surg |
| N0021 | | | | | | | | | | |
| 1HI5H | 3 | 22 | NO | — | | NO | 99.8 | 160 | 39 | Surg |
| 7RMHZ | 2 | 20 | YES | 10 | years | NO | 68 | 165 | 25 | Surg |
| 4WAAB | 1 | 29 | YES | 4 | years | NO | 51 | 166 | 18.5 | Surg |
| 79Z67 | 5 | 24 | YES | 2 | years | YES | 76.2 | 163 | 28.8 | Surg |
| 94-05-7603 | | | | | | | | | | |
| DDSNL | 4 | 19 | NO | — | | NO | 59 | 155 | 24.6 | Surg |
| DH8PH | 3 | 20 | NO | — | | NO | 69.4 | 152 | 29.9 | Surg |
| A503175 | | | | | | | | | | |
| A501111 | | | | | | | | | | |
| A406023 | | | | | | | | | | |
| A407068 | | | | | | | | | | |
| ILS-7286 | | | | | | | | | | |
| A0106 | | | | | | | | | | |
| ILS-1431 | | | | | | | | | | |
| A503176 | | | | | | | | | | |
| ILS-1408 | | | | | | | | | | |
| IND-00375 | | | | | | | | | | |
| A501113 | | | | | | | | | | |
| A407069 | | | | | | | | | | |
| ILS-1406 | | | | | | | | | | |
| E2WKF | 5 | 17 | YES | 6 | years | NO | 92.5 | 168 | 32.9 | Surg |
| 5895C | 2 | 20 | NO | — | | NO | 86.2 | 170 | 29.8 | Surg |
| 533DX | — | — | YES | 2 | years | NO | 108 | 170 | 37.3 | Surg |
| HZ2EY | — | — | NO | — | | NO | 62 | 165 | 22.7 | Surg |
| RWOIV | — | — | NO | — | | NO | 105 | 168 | 37.4 | Surg |
| 1U52X | — | — | | — | | | 64.9 | 152 | 27.9 | Surg |
| A17WS | — | — | NO | — | | NO | 70.3 | 175 | 22.9 | Surg |
| 1VT3I | 2 | 24 | YES | 1 | years | NO | 59.9 | 155 | 24.9 | Surg |
| PZQXH | — | — | YES | 5 | years | NO | 57.6 | 163 | 21.8 | Surg |
| I8VHZ | 2 | 27 | NO | — | | NO | 73 | 160 | 28.5 | Surg |
| 98-03-G803 | | | | | | | | | | |
| 95- | | | | | | | | | | |
| 11-G006 | | | | | | | | | | |
| 2002- | | | | | | | | | | |
| 05-G513 | | | | | | | | | | |
| 2002- | | | | | | | | | | |
| 05-G509 | | | | | | | | | | |
| 95- | | | | | | | | | | |
| 04-2002 | | | | | | | | | | |
| 95- | | | | | | | | | | |
| 10-G020 | | | | | | | | | | |
| IMDA1 | 1 | 24 | NO | — | | | 85.3 | 168 | 30.3 | Surg |
| 12742 | 3 | | | | | | 70 | 155 | 29.1 | Surg |
| A0139 | | | | | | | | | | |
| NJM4U | | | | | | | 73.5 | 168 | 26.1 | Surg |
| USA- | | | | | | | | | | |
| 00273 | | | | | | | | | | |
| RAFCW | 3 | 22 | NO | — | | NO | 98 | 170 | 33.8 | Surg |
| 23177 | | | | | | | 100 | 162 | 38.1 | Surg |
| 16103 | 1 | | | | | | 40 | 160 | 15.6 | Surg |
| A504085 | | | | | | | | | | |
| A504083 | | | | | | | | | | |
| A504084 | | | | | | | | | | |
| A407065 | | | | | | | | | | |
| 1090387 | | | | | | | | | | |
| 2001-07-G084 | | | | | | | | | | |
| 2001- | | | | | | | | | | |
| 10-G002 | | | | | | | | | | |
| SC656 | 2 | 23 | NO | — | | YES | 83.9 | 160 | 32.8 | Surg |
| 3D5FO | — | — | NO | — | | NO | 79 | 163 | 29.9 | Surg |
| 7JP3F | 3 | 19 | YES | 5 | years | NO | 58 | 152 | 25.1 | Surg |
| VNM- | | | | | | | | | | |
| 00187 | | | | | | | | | | |
| 98- | | | | | | | | | | |
| 08- | | | | | | | | | | |
| G001 | | | | | | | | | | |
| 99- | | | | | | | | | | |
| 10-G442 | | | | | | | | | | |
| QLIKY | | | | | | | 72.6 | 175 | 23.6 | Surg |
| 16870 | 2 | | | | | | 100 | 169 | 35 | Surg |
| 99- | | | | | | | | | | |
| 01-G407 | | | | | | | | | | |
| 943EC | | | | | | | 170 | 168 | 60.5 | Surg |
| JO8W7 | | | | | | | 71.2 | 165 | 26.1 | Surg |
| 17016 | 2 | | | | | | 64 | 172 | 21.6 | Surg |
| 99- | | | | | | | | | | |
| 06-G039 | | | | | | | | | | |
| DQQ2F | | | | | | | 107 | 155 | 44.5 | Surg |
| 8786 | 9 | | | | | | 0 | 0 | 0 | Surg |
| 15690 | 3 | | | | | | 97 | 167 | 34.8 | Surg |
| 16843 | 2 | | | | | | 76 | 154 | 32 | Surg |
| 16850 | 2 | | | | | | 89 | 162 | 33.9 | Surg |
| 16848 | 2 | | | | | | 76 | 158 | 30.4 | Surg |
| WPU1U | | | | | | | 74.4 | 163 | 28.2 | Surg |
| Y9VHI | | | | | | | 81 | 170 | 28 | Surg |
| 76VM9 | | | | | | | 59 | 165 | 21.6 | Surg |
| DWHTZ | | | | | | | 92.5 | 168 | 32.9 | Surg |
| SJ2R2 | | | | | | | 65.8 | 155 | 27.4 | Surg |
| 9RQMN | | | | | | | 59 | 163 | 22.3 | Surg |
| TOAE5 | | | | | | | 87 | 165 | 31.9 | Surg |
| TW9PM | | | | | | | 70 | 173 | 23.5 | Surg |
| 2VND2 | | | | | | | 88.5 | 168 | 31.5 | Surg |
| L629F | | | | | | | 68 | 175 | 22.2 | Surg |
| XLB23 | | | | | | | 65 | 175 | 21.2 | Surg |
| IDUVY | | | | | | | 63 | 165 | 23.1 | Surg |
| ZCXAD | | | | | | | 102 | 163 | 38.6 | Surg |
| PEQ6C | | | | | | | 81.2 | 165 | 29.8 | Surg |
| DD73B | | | | | | | 88 | 163 | 33.3 | Surg |
| E2UF7 | | | | | | | 70.3 | 163 | 26.6 | Surg |
| GWXUZ | | | | | | | 72.6 | 165 | 26.6 | Surg |
| 4YG5P | | | | | | | 71.7 | 165 | 26.3 | Surg |
| FDPL9 | | | | | | | 82.1 | 167 | 29.4 | Surg |
| A503274 | | | | | | | | | | |
| A504086 | | | | | | | | | | |
| CG- | | | | | | | | | | |
| 188-7 | | | | | | | | | | |
| A504087 | | | | | | | | | | |

TABLE 1_5_1

| Key | Full Name |
|---|---|
| A | Adenocarcinoma |
| APP | Adenocarcinoma from primary peritoneal |
| BMC | BENIGN MUCINOUS CYSTADENOMA |
| BSC | BENIGN SEROUS CYSTADENOMA |
| BSCF | BENIGN SEROUS CYSTADENOFIBROMA |
| C | Carcinoma |
| C Stage | Cancer stage |
| CAU | Caucasian |
| CCA | Clear cell adenocarcinoma |
| CNOS | Carcinoma NOS |
| EA | ENDOMETROID ADENOCARCINOMA |
| EA of BM | Endometroid adenocarcinoma of borderline |
| | malignancy |
| HT | Height |
| M | Menopausal |
| MA | MUCINOUS ADENOCARCINOMA |
| MBT | MUCINOUS BORDERLINE TUMOR |
| MC | Mucinous cystadenocarcinoma |
| MC Low M | Mucinous cystadenocarcinoma with low malignant |
| Mens. Age | Menstrual Age |
| Mixed . . . | Mixed epithelial cystadenocarcinoma with mucinous, |
| | endometrioid, squamous and papillary serous |
| MS & EA | Mixed serous and endometrioid adenocarcinoma |
| MS & EAM | Mixed serous and endometrioid adenocarcinoma of |
| | mullerian |
| NO-BM | NORMAL OVARY-BM |
| NO-PM | NORMAL OVARY-PM |
| NO-PS | NORMAL OVARY-PS |
| OC | Oral Contraceptive |
| PA | Papillary adenocarcinoma |
| PC | Papillary cystadenocarcinoma |
| PEA | Papillary endometrioid adenocarcinoma |
| PMC | Papillary mucinous cystadenocarcinoma |
| Post-M | Post-menopausal |
| Pre-M | Pre-menopausal |
| PS & EC | Papillary serous and endometrioid cystadenocarcinoma |
| PSA | Papillary serous adenocarcinoma |
| PSC | Papillary serous carcinoma |
| SA | SEROUS ADENOCARCINOMA |
| SPC | Serous papillary cystadenocarcinoma |
| W | White |
| WCAU | WHITE/CAUCASIAN |
| WT | Weight |

TABLE 1_6
Tissue samples in lung cancer testing panel

| | | | sample | | | | | | | | | | |
|---|---|---|---|---|---|---|---|---|---|---|---|---|---|
| | | | id | | | | | | | | | | |
| | | | (GCI)/ | | | | | | | | | | |
| | | | case id | TISSUE | | | | | | | | | |
| | | | (Asterand)/ | ID | RNA | | | | | | | | |
| | | | lot | (GCI)/ | ID (GCI)/ | | | | | | | | |
| | | | no. | specimen | Sample | | | Speci- | | | | | |
| | Source/ | sample | (old | ID | ID | | Diag | men | | | | | |
| Tissue | Delivery | name | samples) | (Asterand) | (Asterand) | Diag | remarks | location | Gr | TNM | CS | Tum % | Gen |
| LC | GCI | 1-GC- | 7Z9V4 | 7Z9V4AYM | | Aden | BC | | | | IA | 80 | F |
| | | BAC-SIA | | | | | | | | | | | |
| LC | GCI | 2-GC- | ZW2AQ | ZW2AQARP | | Aden | BC | | | | IB | 70 | F |
| | | BAC-SIB | | | | | | | | | | | |
| LC | Bioch | 72-(44)- | A501123 | | | AC | | | 2 | UN | | | F |
| | | Bc-BAC | | | | | | | | | | | |
| LC | Bioch | 73-(45)- | A501221 | | | AC | | | UN | UN | | | F |
| | | Bc-BAC | | | | | | | | | | | |
| LC | GCI | 4-GC- | 3MOPL | 3MOPLA79 | | Aden | | | | | IA | 60 | M |
| | | Adeno- | | | | | | | | | | | |
| | | SIA | | | | | | | | | | | |
| LC | GCI | 5-GC- | KOJXD | KOJXDAV4 | | Aden | | | | | IA | 90 | F |
| | | Adeno- | | | | | | | | | | | |
| | | SIA | | | | | | | | | | | |
| LC | GCI | 6-GC- | X2Q44 | X2Q44A79 | | Aden | | | | | IA | 85 | M |
| | | Adeno- | | | | | | | | | | | |
| | | SIA | | | | | | | | | | | |
| LC | GCI | 7-GC- | 6BACZ | 6BACZAP5 | | Aden | | | | | IA | 60 | F |
| | | Adeno- | | | | | | | | | | | |
| | | SIA | | | | | | | | | | | |
| LC | GCI | 8-GC- | BS9AF | BS9AFA3E | | Aden | | | | | IA | 55 | F |
| | | Adeno- | | | | | | | | | | | |
| | | SIA | | | | | | | | | | | |
| LC | GCI | 9-GC- | UCLOA | UCLOAA9L | | Aden | | | | | IA | 80 | F |
| | | Adeno- | | | | | | | | | | | |
| | | SIA | | | | | | | | | | | |
| LC | GCI | 10-GC- | BVYK3 | BVYK3A7Z | | Aden | | | | | IA | 60 | F |
| | | Adeno- | | | | | | | | | | | |
| | | SIA | | | | | | | | | | | |
| LC | GCI | 11-GC- | U4DM4 | U4DM4AFZ | | Aden | | | | | IB | 65 | F |
| | | Adeno- | | | | | | | | | | | |
| | | SIB | | | | | | | | | | | |
| LC | GCI | 12-GC- | OWX5Y | OWX5YA3S | | Aden | | | | | IB | 90 | M |
| | | Adeno- | | | | | | | | | | | |
| | | SIB | | | | | | | | | | | |
| LC | GCI | 13-GC- | XYY96 | XYY96A6B | | Aden | | | | | IIA | 70 | F |
| | | Adeno- | | | | | | | | | | | |
| | | SIIA | | | | | | | | | | | |
| LC | GCI | 14-GC- | SO7B1 | SO7B1AIJ | | Aden | | | | | IIA | 70 | M |
| | | Adeno- | | | | | | | | | | | |
| | | SIIA | | | | | | | | | | | |
| LC | GCI | 15-GC- | QANSY | QANSYACD | | Aden | | | | | IIIA | 65 | F |
| | | Adeno- | | | | | | | | | | | |
| | | SIIIA | | | | | | | | | | | |
| LC | Bioch | 16-(95)- | A610063 | | | Aden | | | 1 | UN | | | F |
| | | BC- | | | | | | | | | | | |
| | | Adeno | | | | | | | | | | | |
| LC | Bioch | 17-(89)- | A609077 | | | Aden | | | 2-3 | UN | | | M |
| | | Bc- | | | | | | | | | | | |
| | | Adeno | | | | | | | | | | | |
| LC | Bioch | 18-(76)- | A609218 | | | Aden | | | 3 | UN | | | M |
| | | Bc- | | | | | | | | | | | |
| | | Adeno | | | | | | | | | | | |
| LC | Bioch | 74-(2)-Bc- | A504118 | | | Aden | | | 1 | UN | | | M |
| | | Adeno | | | | | | | | | | | |
| LC | Bioch | 76-(75)- | A609217 | | | Aden | | | 2 | UN | | | M |
| | | Bc- | | | | | | | | | | | |
| | | Adeno | | | | | | | | | | | |
| LC | Bioch | 77-(12)- | A504119 | | | Aden | | | 2 | UN | | | F |
| | | Bc- | | | | | | | | | | | |
| | | Adeno | | | | | | | | | | | |
| LC | Bioch | 78-(13)- | A504116 | | | Aden | | | 2-3 | UN | | | M |
| | | Bc- | | | | | | | | | | | |
| | | Adeno | | | | | | | | | | | |
| LC | Bioch | 79-(94)- | A610118 | | | Aden | | | 3 | UN | | | M |
| | | Bc- | | | | | | | | | | | |
| | | Adeno | | | | | | | | | | | |
| LC | Ichilov | 80-(3)-Ic- | CG-200 | | | Aden | | | UN | UN | | | F |
| | | Adeno | | | | | | | | | | | |
| LC | Ichilov | 81-(14)- | CG-111 | | | Aden | | | UN | UN | | | M |
| | | Ic-Adeno | | | | | | | | | | | |
| LC | Aster | 19-As-Sq- | 9220 | 9418 | 9418A1 | SCC | | | 1 | TXN0M0 | Occult | 80 | M |
| | | S0 | | | | | | | | | | | |
| LC | GCI | 20-GC- | U2QHS | U2QHSA2N | | SCC | | | | | IA | 55 | F |
| | | Sq-SIA | | | | | | | | | | | |
| LC | GCI | 21-GC- | TRQR7 | TRQR7ACD | | SCC | | | | | IB | 75 | M |
| | | Sq-SIB | | | | | | | | | | | |
| LC | Aster | 22-As-Sq- | 17581 | 32603 | 32603B1 | SCC | | | 3 | T2N0M0 | IB | 90 | M |
| | | SIB | | | | | | | | | | | |
| LC | Aster | 23-As-Sq- | 18309 | 41454 | 41454B1 | SCC | | | 2 | T2N0MX | IB | 100 | M |
| | | SIB | | | | | | | | | | | |
| LC | Aster | 24-As-Sq- | 9217 | 9415 | 9415B1 | SCC | | | 2 | T2N0M0 | IB | 90 | M |
| | | SIB | | | | | | | | | | | |
| LC | GCI | 25-GC- | RXQ1P | RXQ1PAEA | | SCC | | | | | IIB | 55 | F |
| | | Sq-SIIB | | | | | | | | | | | |
| LC | GCI | 26-GC- | KB5KH | KB5KHA6X | | SCC | | | | | IIB | 65 | M |
| | | Sq-SIIB | | | | | | | | | | | |
| LC | GCI | 27-GC- | LAYMB | LAYMBALF | | SCC | | | | | IIIA | 65 | F |
| | | Sq-SIIIA | | | | | | | | | | | |
| LC | Ichilov | 28-(23)- | CG-109 (1) | | | SCC | | | UN | UN | | | M |
| | | Ic-Sq | | | | | | | | | | | |
| LC | Ichilov | 29-(25)- | CG-204 | | | SCC | | | UN | UN | | | M |
| | | Ic-Sq | | | | | | | | | | | |
| LC | Bioch | 30-(19)- | A408175 | | | SCC | | | 1 | UN | | | M |
| | | Bc-Sq | | | | | | | | | | | |
| LC | Bioch | 31-(78)- | A607125 | | | SCC | | | 2 | UN | | | M |
| | | Bc-Sq | | | | | | | | | | | |
| LC | Bioch | 32-(16)- | A409091 | | | SCC | | | 2 | UN | | | F |
| | | Bc-Sq | | | | | | | | | | | |
| LC | Bioch | 33-(80)- | A609163 | | | SCC | | | 2 | UN | | | M |
| | | Bc-Sq | | | | | | | | | | | |
| LC | Bioch | 34-(18)- | A503387 | | | SCC | | | 2-3 | UN | | | M |
| | | Bc-Sq | | | | | | | | | | | |
| LC | Bioch | 92-(38)- | A504113 | | | LCC | | | UN | UN | | | M |
| | | Bc-LCC | | | | | | | | | | | |
| LC | Bioch | 93-(82)- | A609170 | | | LCNC | | | UN | UN | | | M |
| | | Bc-LCC | | | | | | | | | | | |
| LC | GCI | 42-GC- | QPJQL | QPJQLAF6 | | SMCC | NC | | 3 | | IB | 65 | F |
| | | SCC-SIB | | | | | | | | | | | |
| LC | Bioch | 43-(32)- | A501391 | | | SMCC | | | | UN | | | M |
| | | Bc-SCC | | | | | | | | | | | |
| LC | Bioch | 44-(30)- | A501389 | | | SMCC | | | 3 | UN | | | M |
| | | Bc-SCC | | | | | | | | | | | |
| LC | Bioch | 45-(83)- | A609162 | | | SMCC | | | UN | UN | | | F |
| | | Bc-SCC | | | | | | | | | | | |
| LC | Bioch | 46-(86)- | A608032 | | | SMCC | | | 3 | UN | | | F |
| | | Bc-SCC | | | | | | | | | | | |
| LC | Bioch | 47-(31)- | A501390 | | | SMCC | | | | UN | | | F |
| | | Bc-SCC | | | | | | | | | | | |
| LC | Bioch | 48-(84)- | A609167 | | | SMCC | | | UN | UN | | | F |
| | | Bc-SCC | | | | | | | | | | | |
| LC | Bioch | 49-(85)- | A609169 | | | SMCC | | | UN | UN | | | M |
| | | Bc-SCC | | | | | | | | | | | |
| LC | Bioch | 50-(33)- | A504115 | | | SMCC | | | | UN | | | M |
| | | Bc-SCC | | | | | | | | | | | |
| LN | Aster | 51-As-N- | 9078 | 9275 | 9275B1 | Norm-L | PS | | | | | | M |
| | | PS | | | | | | | | | | | |
| LN | Aster | 52-As-N- | 8757 | 8100 | 8100B1 | Norm-L | PM | (Right), | | | | | F |
| | | PM | | | | | | Lobe | | | | | |
| | | | | | | | | Inferior | | | | | |
| LN | Aster | 53-As-N- | 6692 | 6161 | 6161A1 | Norm-L | PM | | | | | | M |
| | | PM | | | | | | | | | | | |
| LN | Aster | 54-As-N- | 7900 | 7180 | 7180F1 | Norm-L | PM | | | | | | F |
| | | PM | | | | | | | | | | | |
| LN | Aster | 55-As-N- | 8771 | 8163 | 8163A1 | Norm-L | PM | (Left), | | | | | M |
| | | PM | | | | | | Lobe | | | | | |
| | | | | | | | | Supe- | | | | | |
| | | | | | | | | rior | | | | | |
| LC | Bioch | 35-(81)- | A609076 | | | SCC | | | 3 | UN | | | M |
| | | Bc-Sq | | | | | | | | | | | |
| LC | Bioch | 82-(21)- | A503187 | | | SCC | | | 2 | UN | | | M |
| | | Bc-Sq | | | | | | | | | | | |
| LC | Bioch | 83-(17)- | A503183 | | | SCC | | | 2 | UN | | | M |
| | | Bc-Sq | | | | | | | | | | | |
| LC | Bioch | 84-(79)- | A609018 | | | SCC | | | 3 | UN | | | M |
| | | Bc-Sq | | | | | | | | | | | |
| LC | Bioch | 85-(22)- | A503386 | | | SCC | | | UN | UN | | | M |
| | | Bc-Sq | | | | | | | | | | | |
| LC | Bioch | 86-(20)- | A501121 | | | SCC | | | UN | UN | | | M |
| | | Bc-Sq | | | | | | | | | | | |
| LC | Bioch | 87-(88)- | A609219 | | | SCC | | | UN | UN | | | M |
| | | Bc-Sq | | | | | | | | | | | |
| LC | Bioch | 88-(100)- | A409017 | | | SCC | | | UN | UN | | | M |
| | | Bc-Sq | | | | | | | | | | | |
| LC | Ichilov | 89-(24)- | CG-123 | | | SCC | | | UN | UN | | | M |
| | | Ic-Sq | | | | | | | | | | | |
| LC | GCI | 36-GC- | AF8AL | AF8ALAAL | | LCC | | | | | IA | 85 | M |
| | | LCC-SIA | | | | | | | | | | | |
| LC | GCI | 37-GC- | O62XU | O62XUA1X | | LCC | | | | | IB | 75 | F |
| | | LCC-SIB | | | | | | | | | | | |
| LC | GCI | 38-GC- | OLOIM | OLOIMAS1 | | LCC | | | | | IB | 70 | M |
| | | LCC-SIB | | | | | | | | | | | |
| LC | GCI | 39-GC- | 1ZWSV | 1ZWSVAB9 | | LCC | | | | | IIB | 50 | M |
| | | LCC-SIIB | | | | | | | | | | | |
| LC | GCI | 40-GC- | 2YHOD | 2YHODA1H | | LCC | NSCC | | | | IIB | 95 | M |
| | | LCC-SIIB | | | | | . . . | | | | | | |
| LC | GCI | 41-GC- | 38B4D | 38B4DAQK | | LCC | | | | | IIB | 90 | F |
| | | LCC-SIIB | | | | | | | | | | | |
| LC | Bioch | 90-(39)- | A504114 | | | LCC | | | UN | UN | | | F |
| | | Bc-LCC | | | | | | | | | | | |
| LC | Bioch | 91-(87)- | A609165 | | | LCC | | | 3 | UN | | | F |
| | | Bc-LCC | | | | | | | | | | | |
| LN | Aster | 56-As-N- | 13094 | 19763 | 19763A1 | Norm-L | PM | | | | | | M |
| | | PM | | | | | | | | | | | |
| LN | Aster | 57-As-N- | 19174 | 40654 | 40654A2 | Norm-L | PM | | | | | | F |
| | | PM | | | | | | | | | | | |
| LN | Aster | 58-As-N- | 13128 | 19642 | 19642A1 | Norm-L | PM | | | | | | F |
| | | PM | | | | | | | | | | | |
| LN | Aster | 59-As-N- | 14374 | 20548 | 20548C1 | Norm-L | PM | (Right), | | | | | F |
| | | PM | | | | | | Lobe | | | | | |
| | | | | | | | | Supe- | | | | | |
| | | | | | | | | rior | | | | | |
| LN | Amb | 60-(99)- | 36856 | | | N-PM | PM | | | | | | M |
| | | Am-N | | | | | | | | | | | |
| | | PM | | | | | | | | | | | |
| LN | Amb | 61-(96)- | 36853 | | | N-PM | PM | | | | | | F |
| | | Am-N | | | | | | | | | | | |
| | | PM | | | | | | | | | | | |
| LN | Amb | 62-(97)- | 36854 | | | N-PM | PM | | | | | | M |
| | | Am-N | | | | | | | | | | | |
| | | PM | | | | | | | | | | | |
| LN | Amb | 63-(93)- | 111P0103A | | | N-PM | PM- | | | | | | F |
| | | Am-N | | | | | ICH | | | | | | |
| | | PM | | | | | | | | | | | |
| LN | Amb | 64-(98)- | 36855 | | | N-PM | PM | | | | | | F |
| | | Am-N | | | | | | | | | | | |
| | | PM | | | | | | | | | | | |
| LN | Bioch | 67-(50)- | A503385 | | | N-PM | PM | | | | | | M |
| | | Bc-N PM | | | | | | | | | | | |
| LN | Bioch | 68-(92)- | A503204 | | | N-PM | PM | | | | | | M |
| | | Bc-N PM | | | | | | | | | | | |
| LN | Bioch | 69-(91)- | A607257 | | | N-P2- | PM | | | | | | P2 |
| | | Bc-N PM | | | | PM | | | | | | | |
| LN | Bioch | 70-(90)- | A608152 | | | N-P2 | PM | | | | | | P2 |
| | | Bc-N PM | | | | PM | | | | | | | |
| LN | Bioch | 71-(48)- | A503206 | | | N-PM | PM | | | | | | M |
| | | Bc-N PM | | | | | | | | | | | |

| | | | | | # of | | | | | | | | | | |
|---|---|---|---|---|---|---|---|---|---|---|---|---|---|---|---|
| | | | | | Y. | | | | | | | | | | |
| | | | | # Cig. | Use | # Y. | | | | | | | | Cause | |
| | | | Smoking | Per | of | off | Sm | Sm | Dr | # | HT | | Recovery | of | Exc. |
| Tissue | age | Ethnic B | Status | day | Tobacco | Tobacco | P Y? | ppl | Al | Dr | (CM) | BMI | Type | Death | Y. |
| LC | 63 | WCAU | Prev | 20 | 15 | 27 | N | — | Y | 0 | 165 | 25.3 | Surg | | 2001 |
| | | | U. | | | | | | | | | | | | |
| LC | 56 | WCAU | Prev | 15 | 28 | 10 | Y | 1 | Y | 6 | 165 | 23 | Surg | | 2002 |
| | | | U. | | | | | | | | | | | | |
| LC | 61 | | | | | | | | | | | | | | |
| LC | 50 | | | | | | | | | | | | | | |
| LC | 68 | WCAU | Nev | — | — | — | N | — | N | — | 175 | 27.3 | Surg | | 2001 |
| | | | U. | | | | | | | | | | | | |
| LC | 64 | WCAU | Prev | 15 | 40 | 7 | Y | 1 | N | 0 | 157 | 19.6 | Surg | | 2003 |
| | | | U. | | | | | | | | | | | | |
| LC | 58 | WCAU | Prev | 10 | 47 | 0 | Y | 2 | N | — | 170 | 24.6 | Surg | | 2004 |
| | | | U. | | | | | | | | | | | | |
| LC | 65 | WCAU | Curr | 6 | 30 | — | Y | 1 | N | — | 168 | 21 | Surg | | 2004 |
| | | | U. | | | | | | | | | | | | |
| LC | 59 | WCAU | Curr | 20 | 40 | — | N | — | N | — | 160 | 23.9 | Surg | | 2004 |
| | | | U. | | | | | | | | | | | | |
| LC | 69 | WCAU | Curr | 30 | 52 | — | Y | 4 | N | — | 157 | 34.8 | Surg | | 2005 |
| | | | U. | | | | | | | | | | | | |
| LC | 60 | WCAU | Curr | 40 | 40 | — | N | — | N | — | 163 | 31.8 | Surg | | 2002 |
| | | | U. | | | | | | | | | | | | |
| LC | 68 | WCAU | Prev | 5 | 4 | 43 | N | — | N | — | 165 | 22.3 | Surg | | 2003 |
| | | | U. | | | | | | | | | | | | |
| LC | 69 | WCAU | Curr | 10 | — | — | | — | N | — | 183 | 30.5 | Surg | | 2002 |
| | | | U. | | | | | | | | | | | | |
| LC | 62 | WCAU | Prev | 6 | 40 | 6 | N | — | Y | 0 | 160 | 27 | Surg | | 2004 |
| | | | U. | | | | | | | | | | | | |
| LC | 56 | WCAU | Curr | 30 | 25 | — | Y | 1 | N | — | 180 | 36.4 | Surg | | 2001 |
| | | | U. | | | | | | | | | | | | |
| LC | 61 | WCAU | Curr | 30 | 36 | — | Y | 1 | N | — | 163 | 25.1 | Surg | | 2004 |
| | | | U. | | | | | | | | | | | | |
| LC | 54 | | | | | | | | | | | | | | |
| LC | 62 | | | | | | | | | | | | | | |
| LC | 57 | | | | | | | | | | | | | | |
| LC | 64 | | | | | | | | | | | | | | |
| LC | 65 | | | | | | | | | | | | | | |
| LC | 74 | | | | | | | | | | | | | | |
| LC | 64 | | | | | | | | | | | | | | |
| LC | 68 | | | | | | | | | | | | | | |
| LC | 56 | | | | | | | | | | | | | | |
| LC | 68 | | | | | | | | | | | | | | |
| LC | 67 | CAU | Curr | 11-20 | 31-40 | | | | O | | 163 | 28.6 | Surg | | 2003 |
| | | | U. | | | | | | | | | | | | |
| LC | 68 | WCAU | Prev | 10 | 20 | 0 | N | — | N | — | 157 | 22.9 | Surg | | 2004 |
| | | | U. | | | | | | | | | | | | |
| LC | 62 | WCAU | Prev | 20 | 50 | 0 | Y | 5 | N | — | 175 | 25.5 | Surg | | 2005 |
| | | | U. | | | | | | | | | | | | |
| LC | 73 | CAU | Prev | | | | | | O | | 170 | 22.1 | Surg | | 2004 |
| | | | U. | | | | | | | | | | | | |
| LC | 66 | CAU | Prev | 11-20 | 45 | | | | P | | 178 | 33.8 | Surg | | 2005 |
| | | | U. | | | | | | | | | | | | |
| LC | 65 | CAU | Curr | 6-10 | 41-50 | | | | O | | 176 | 22 | Surg | | 2002 |
| | | | U. | | | | | | | | | | | | |
| LC | 44 | WCAU | Prev | 20 | 20 | 0 | Y | 2 | N | — | 155 | 22.7 | Surg | | 2004 |
| | | | U. | | | | | | | | | | | | |
| LC | 68 | WCAU | Prev | 40 | 40 | 0 | Y | 2 | N | — | 170 | 23.2 | Surg | | 2004 |
| | | | U. | | | | | | | | | | | | |
| LC | 58 | WCAU | Prev | 50 | 40 | 1 | Y | 2 | N | — | 173 | 27.4 | Surg | | 2004 |
| | | | U. | | | | | | | | | | | | |
| LC | 65 | | | | | | | | | | | | | | |
| LC | 72 | | | | | | | | | | | | | | |
| LC | 78 | | | | | | | | | | | | | | |
| LC | 62 | | | | | | | | | | | | | | |
| LC | 68 | | | | | | | | | | | | | | |
| LC | 74 | | | | | | | | | | | | | | |
| LC | 63 | | | | | | | | | | | | | | |
| LC | 58 | | | | | | | | | | | | | | |
| LC | 68 | | | | | | | | | | | | | | |
| LC | 62 | WCAU | Prev | 20 | 35 | 0.15 | Y | 2 | N | — | 165 | 19.8 | Surg | | 2003 |
| | | | U. | | | | | | | | | | | | |
| LC | 30 | | | | | | | | | | | | | | |
| LC | 34 | | | | | | | | | | | | | | |
| LC | 47 | | | | | | | | | | | | | | |
| LC | 52 | | | | | | | | | | | | | | |
| LC | 59 | | | | | | | | | | | | | | |
| LC | 59 | | | | | | | | | | | | | | |
| LC | 66 | | | | | | | | | | | | | | |
| LC | | | | | | | | | | | | | | | |
| LN | 22 | CAU | Nev | | | | | | NU | | 0 | 0 | Surg | | 2003 |
| | | | U. | | | | | | | | | | | | |
| LN | 26 | CAU | Nev | | | | | | O | | 170 | 22.1 | Aut | CA | 2003 |
| | | | U. | | | | | | | | | | | | |
| LN | 37 | CAU | Nev | | | | | | C | | 183 | 20.9 | Aut | MCE | 2002 |
| | | | U. | | | | | | | | | | | | |
| LN | 76 | CAU | Prev | | | | | | | | 165 | 26.8 | Aut | CPul A | 2002 |
| | | | U. | | | | | | | | | | | | |
| LN | 81 | CAU | Prev | 41 or | 31-40 | | | | O | | 183 | 30.5 | Aut | CA | 2003 |
| | | | U. | more | | | | | | | | | | | |
| LC | 53 | | | | | | | | | | | | | | |
| LC | 52 | | | | | | | | | | | | | | |
| LC | 57 | | | | | | | | | | | | | | |
| LC | 67 | | | | | | | | | | | | | | |
| LC | 48 | | | | | | | | | | | | | | |
| LC | 64 | | | | | | | | | | | | | | |
| LC | 64 | | | | | | | | | | | | | | |
| LC | 64 | | | | | | | | | | | | | | |
| LC | 76 | | | | | | | | | | | | | | |
| LC | 45 | WCAU | Prev | 45 | 33 | 0 | Y | 2 | Y | 28 | 178 | 31.9 | Surg | | 2004 |
| | | | U. | | | | | | | | | | | | |
| LC | 60 | WCAU | Prev | 30 | 45 | 0 | Y | 3 | N | — | 160 | 16.8 | Surg | | 2004 |
| | | | U. | | | | | | | | | | | | |
| LC | 68 | WCAU | Prev | — | 55 | — | Y | — | N | — | 173 | 22.8 | Surg | | 2001 |
| | | | U. | | | | | | | | | | | | |
| LC | 51 | WCAU | Prev | 20 | 12 | 22 | Y | 1 | N | — | 183 | 26.6 | Surg | | 2004 |
| | | | U. | | | | | | | | | | | | |
| LC | 62 | WCAU | Prev | 40 | 40 | 0 | Y | 2 | Y | 12 | 185 | 23.1 | Surg | | 2004 |
| | | | U. | | | | | | | | | | | | |
| LC | 70 | WCAU | Prev | 30 | 50 | — | Y | 2 | Y | 13 | 168 | 20.7 | Surg | | 2002 |
| | | | U. | | | | | | | | | | | | |
| LC | 35 | | | | | | | | | | | | | | |
| LC | 47 | | | | | | | | | | | | | | |
| LN | 0 | CAU | Prev | 21-40 | 41-50 | | | | P | | 175 | 25.1 | Aut | IC | |
| | | | U. | | | | | | | | | | | | |
| LN | 69 | CAU | Curr | 21-40 | 31-50 | | | | P | | 165 | 22.4 | Aut | CPul A | 2005 |
| | | | U. | | | | | | | | | | | | |
| LN | 75 | CAU | | | | | | | | | 160 | 21.5 | Aut | CPul A | 2004 |
| LN | 75 | CAU | | | | | | | | | 175 | 32.7 | Aut | Cer A | 2004 |
| LN | 31 | | | | | | | | | | | | | | |
| LN | 43 | | | | | | | | | | | | | | |
| LN | 46 | | | | | | | | | | | | | | |
| LN | 61 | | | | | | | | | | | | | | |
| LN | 72 | | | | | | | | | | | | | | |
| LN | 28 | | | | | | | | | | | | | | |
| LN | 28 | | | | | | | | | | | | | | |
| LN | 24, 29 | | | | | | | | | | | | | | |
| LN | 27, 28 | | | | | | | | | | | | | | |
| LN | 44 | | | | | | | | | | | | | | |

TABLE 1_6_1

| Key | Full Name |
|---|---|
| # Cig. Per day | Number of Cigarettes per day |
| # Dr | Number of Drinks |
| # of Y. Use of Tobacco | Number of Years Using Tobacco |
| # Y. off Tobacco | Number of Years Off Tobacco |
| AC | Alveolus carcinoma |
| Aden | ADENOCARCINOMA |
| Amb | Ambion |
| Aster | Asterand |
| Aut | Autopsy |
| BC | BRONCHIOLOALVEOLAR CARCINOMA |
| Bioch | Biochain |
| C | Current Use |
| CA | Cardiac arrest |
| CAU | Caucasian |
| Cer A | Cerebrovascular accident |
| CPul A | Cardiopulmonary arrest |
| CS | Cancer Stage |
| Curr U. | Current Use |
| Diag | Diagnosis |
| Dr Al | Drink Alcohol? |
| Exc Y. | Excision Year |
| Gen | Gender |
| Gr | Grade |
| Height | HT |
| IC | Ischemic cardiomyopathy |
| LC | Lung Cancer |
| LCC | LARGE CELL CARCINOMA |
| LCNC | Large Cell Neuroendocrine Carcinoma |
| LN | Lung Normal |
| MCE | Massive cerebral edema |
| N | No |
| NC | NEUROENDOCRINE CARCINOMA |
| Nev. U. | Never Used |
| Norm-L | Normal Lung |
| N-P2-PM | Normal (Pool 2)- PM |
| N-PM | Normal-PM |
| NSCC . . . | NON-SMALL CELL CARCINOMA WITH |
| | SARCOMUTOUS TRANSFORMTAIO |
| NU | Never used |
| O | Occasional Use |
| P | Previous Use |
| P2 | Pool 2 |
| Prev U. | Previous Use |
| SCC | Squamous Cell Carcinoma |
| Sm P Y? | Have people at home smoked in past 15 yr |
| Sm ppl | If yes, how many? |
| SMCC | SMALL CELL CARCINOMA |
| SMOKE_GROWING_UP | Did people smoke at home while growing up |
| Surg | Surgical |
| Tum % | Tumor Percentage |
| WCAU | White Caucasian |
| Y | Yes |

TABLE 1_7
Tissue samples in Breast cancer testing panel

| | | | | | | | | |
|---|---|---|---|---|---|---|---|---|
| BC | GCI | 33-GC-IDC | YQ1WW | YQ1WWAUV | | IDC | | |
| | | SIIIB | | | | | | |
| BC | GCI | 34-GC-IDC | KIOE7 | KIOE7AI9 | | IDC | | |
| | | SIIIB | | | | | | |
| BC | Bioch | 70-(43)-Bc- | A609183 | | | IDC | 2 | |
| | | IDC | | | | | | |
| BC | Bioch | 71-(54)-Bc- | A605353 | | | IDC | 2 | |
| | | IDC | | | | | | |
| BC | ABS | 72-(55)-Bc- | A609179 | | | IDC | 2 | |
| | | IDC | | | | | | |
| BC | Bioch | 73-(47)-Bc- | A609221 | | | IDC | 2 | |
| | | IDC | | | | | | |
| BC | Bioch | 74-(48)-Bc- | A609222 | | | IDC | 2 | |
| | | IDC | | | | | | |
| BC | Bioch | 75-(53)-Bc- | A605151 | | | IDC | 2 | |
| | | IDC | | | | | | |
| BC | Bioch | 76-(61)-Bc- | A610029 | | | IDC | 2 | |
| | | IDC | | | | | | |
| BC | Bioch | 77-(46)-Bc- | A609177 | | | Carc | 2 | |
| | | Carci | | | | | | |
| BC | Ichilov | 78-(62)-Bc- | A609194 | | | IDC | 2 | |
| | | IDC | | | | | | |
| BC | Amb | 79-(32)-AB- | 7116T | | | MC | | T2N0M0 |
| | | Muc Carci | | | | | | |
| | | SIIA | | | | | | |
| BC | GCI | 80-(49)-Bc- | A609223 | | | IDC | 2 | |
| | | IDC | | | | | | |
| BC | GCI | 81-(45)-Bc- | A609181 | | | IDC | 2 | |
| | | IDC | | | | | | |
| BC | GCI | 82-(50)-Bc- | A609224 | | | IDC | 2 | |
| | | IDC | | | | | | |
| BC | Bioch | 83-(44)-Bc- | A609198 | | | IDC | 2 | |
| | | IDC | | | | | | |
| BC | Bioch | 84-(51)-Bc- | A605361 | | | IDC | 1 | |
| | | IDC | | | | | | |
| BC | Amb | 85-(31)-Ic- | CG-154 | | | IDC | | |
| | | IDC | | | | | | |
| BC | Aster | 35-As-ILC | 17090 | 30738 | 30738A1 | ILC | | T1cNXM0 |
| | | SI | | | | | | |
| BC | GCI | 36-GC-ILC | I35US | I35USA9G | | ILC | | |
| | | SIIA | | | | | | |
| BC | GCI | 37-GC-ILC | IS84Y | IS84YAAY | | ILC | | |
| | | SIIB | | | | | | |
| BC | Bioch | 38-(52)-Bc- | A605360 | | | ILC | 1 | |
| | | ILC | | | | | | |
| BB | Aster | 39-As-Ben | 11975 | 15478 | 15478B1 | FIBR | | |
| BB | GCI | 40-GC-Ben | ZT15M | ZT15MAMR | | FIBR | | |
| BB | GCI | 41-GC-Ben | NNP3Q | NNP3QA4V | | FIBR | | |
| BB | GCI | 42-GC-Ben | QK8IY | QK8IYALU | | FIBR | | |
| BN-PS | GCI | 43-GC-N | 83LO7 | 83LO7NEH | | NB-PS | | |
| | | PS | | | | | | |
| BN-PS | GCI | 45-GC-N | O6JBJ | O6JBJNT1 | | NB-PS | | |
| | | PS | | | | | | |
| BN-PS | GCI | 46-GC-N | E6UDD | E6UDDNCF | | NB-PS | | |
| | | PS | | | | | | |
| BN-PS | GCI | 47-GC-N | DHLR1 | DHLR1NIQ | | NB-PS | | |
| | | PS | | | | | | |
| BN-PS | GCI | 48-GC-N | JHQEH | JHQEHN4D | | NB-PS | | |
| | | PS | | | | | | |
| BN-PS | Amb | 49-(63)-Am- | 26486 | | | NB-PS | | |
| | | N PS | | | | | | |
| BN-PS | GCI | 50-GC-N | ONBFK | ONBFKNO2 | | NB-PS | | |
| | | PS | | | | | | |
| BN-PS | GCI | 51-GC-N | TG6J6 | TG6J6NNA | | NB-PS | | |
| | | PS | | | | | | |
| BN-PS | Aster | 52-GC-N | 14398 | 20021 | 20021D1 | NB-PS | | |
| | | PS | | | | | | |
| BN-PS | GCI | 54-GC-N | AJGXV | AJGXVNFC | | NB-PS | | |
| | | PS | | | | | | |
| BN-PS | GCI | 56-GC-N | HLCZX | HLCZXNLS | | NB-PS | | |
| | | PS | | | | | | |
| BN-PS | GCI | 58-GC-N | FGV8P | FGV8PNQ6 | | NB-PS | | |
| | | PS | | | | | | |
| BN-? | Aster | 59-As-N PS | 9264 | 9486 | 9486A1 | NB-PS | | |
| BN-PM | Bioch | 60-(57)-Bc- | A609233 | A609233 | | NB-PM | | |
| | | N PM | | | | | | |
| BN-PM | Bioch | 61-(59)-Bc- | A607155 | A607155 | | NB-PM | | |
| | | N PM | | | | | | |
| BN-PM | Bioch | 62-(60)-Bc- | A609234 | A609234 | | NB-PM | | |
| | | N PM | | | | | | |
| BN-PM | Amb | 63-(66)-Am- | 36678 | 36678 | | NB-PM | | |
| | | N PM | | | | | | |
| BN-PM | Amb | 64-(64)-Am- | 23036 | 23036 | | NB-PM | | |
| | | N PM | | | | | | |
| BN-PM | Amb | 65-(65)-Am- | 31410 | 31410 | | NB-PM | | |
| | | N PM | | | | | | |
| BN-PM | Amb | 66-(67)-Am- | 073P010602086A | 073P010602086A | | NB-PM | | |
| | | N PM | | | | | | |
| BN-PM | Bioch | 67-(58)-Bc- | A609232 | A609232 | | NB-PM | | |
| | | N PM | | | | | | |
| BN-PM | Aster | 68-As-N | 8862 | 8766 | 8766B1 | NB-PM | | |
| | | PM | | | | | | |
| BN-PM | Aster | 69-As-N | 8457 | 7928 | 7928M1 | NB-PM | | |
| | | PM | | | | | | |

| | | | | | | | | | | | | | | |
|---|---|---|---|---|---|---|---|---|---|---|---|---|---|---|
| BC | IIIB | 60 | 62 | Pre-M | 78 | 163 | 29.5 | WCAU | 0 | — | — | — | Surg | 1940 |
| BC | IIIB | 55 | 65 | Post-M | 73.5 | 157 | 29.6 | WCAU | 2 | 2 | 18 | 2 | Surg | 1939 |
| BC | | | 40 | | | | | | | | | | | |
| BC | | | 41 | | | | | | | | | | | |
| BC | | | 42 | | | | | | | | | | | |
| BC | | | 42 | | | | | | | | | | | |
| BC | | | 44 | | | | | | | | | | | |
| BC | | | 44 | | | | | | | | | | | |
| BC | | | 46 | | | | | | | | | | | |
| BC | | | 48 | | | | | | | | | | | |
| BC | | | 51 | | | | | | | | | | | |
| BC | IIA | | 54 | | | | | | | | | | | |
| BC | | | 54 | | | | | | | | | | | |
| BC | | | 58 | | | | | | | | | | | |
| BC | | | 69 | | | | | | | | | | | |
| BC | | | 77 | | | | | | | | | | | |
| BC | | | 79 | | | | | | | | | | | |
| BC | | | 83 | | | | | | | | | | | |
| BC | I | 100 | 50 | | 94 | 170 | 32.5 | W | 2 | 2 | | | Surg | |
| BC | IIA | 60 | 70 | | 77.1 | 178 | 24.4 | WCAU | — | — | — | — | Surg | 1932 |
| BC | IIB | 65 | 67 | Post-M | 62.6 | 163 | 23.7 | WCAU | 2 | 2 | 16 | 0 | Surg | 1934 |
| BC | | | 60 | | | | | | | | | | | |
| BB | | 100 | 24 | Pre-M | 80 | 164 | 29.7 | CAU | 2 | 0 | | | Surg | |
| BB | | 100 | 34 | | 57.6 | 165 | 21.1 | WCAU | | | | | Surg | 1967 |
| BB | | 95 | 54 | | 56.7 | 157 | 22.9 | WCAU | | | | | Surg | 1948 |
| BB | | 100 | 41 | | 59 | 173 | 19.7 | WCAU | | | | | Surg | 1960 |
| BN-PS | | | 32 | | 78.5 | 155 | 32.7 | WCAU | | | | | Surg | 1969 |
| BN-PS | | | 38 | | 67.1 | 173 | 22.5 | WCAU | | | | | Surg | 1963 |
| BN-PS | | | 40 | | 99.8 | 170 | 34.5 | WCAU | | | | | Surg | 1961 |
| BN-PS | | | 40 | | 90.7 | 168 | 32.3 | WCAU | | | | | Surg | 1961 |
| BN-PS | | | 41 | | 65.3 | 157 | 26.3 | WCAU | | | | | Surg | 1960 |
| BN-PS | | | 43 | | | | | | | | | | | |
| BN-PS | | | 45 | | 81.6 | 165 | 30.0 | WCAU | | | | | Surg | 1956 |
| BN-PS | | | 46 | | 90.7 | 173 | 30.4 | WCAU | | | | | Surg | 1955 |
| BN-PS | | | 49 | Pre-M | 68 | 165 | 25.0 | CAU | 3 | 3 | | | Surg | |
| BN-PS | | | 52 | | 70 | 168 | 24.8 | WCAU | | | | | Surg | 1949 |
| BN-PS | | | 54 | | 67 | 163 | 25.2 | WCAU | | | | | Surg | 1947 |
| BN-PS | | | 61 | | 106.6 | 168 | 37.9 | WCAU | | | | | Surg | 1940 |
| BN-? | | | 0 | | 0 | 0 | 0.0 | | | | | | | |
| BN-PM | | | 34 | | | | | | | | | | Aut | |
| BN-PM | | | 35 | | | | | | | | | | Aut | |
| BN-PM | | | 36 | | | | | | | | | | Aut | |
| BN-PM | | | 45 | | | | | | | | | | Aut | |
| BN-PM | | | 57 | | | | | | | | | | Aut | |
| BN-PM | | | 63 | | | | | | | | | | Aut | |
| BN-PM | | | 64 | | | | | | | | | | Aut | |
| BN-PM | | | 65 | | | | | | | | | | Aut | |
| BN-PM | | | 74 | | 64 | 157 | 26.0 | CAU | | | | | Aut | |
| BN-PM | | | 87 | | 59 | 165 | 21.7 | CAU | | | | | Aut | |

TABLE 1_7_1

| Key | Full Name |
|---|---|
| # Live Bir | # Live Births |
| # of Preg | Number of Pregnancies |
| Amb | Ambion |
| Aster | Asterand |
| Aut | Autopsy |
| BB | Breast Benign |
| BC | Breast Cancer |
| Bioch | Biochain |
| BN | Breast Normal |
| BN-PM | Breast_Normal-PM |
| BN-PS | Breast_Normal-PS |
| Breastfeed child | Br Child |
| C Stage | Cancer Stage |
| Carc | Carcinoma |
| CAU | Caucasian |
| DCIS | Ductal Carcinoma In Situ |
| Ethnic B | Ethnic Background |
| FIBR | FIBROADENOMA |
| IDC | INFILTRATING DUCTAL CARCINOMA |
| ILC | INFILTRATING LOBULAR CARCINOMA |
| M | Menopausal |
| MC | Mucinous carcinoma |
| MS | Menopausal Status |
| NB-PM | NORMAL BREAST-PM |
| NB-PS | NORMAL BREAST-PS |
| Post-M | Post-Menopausal |
| Pre-M | Pre-Menopausal |
| Samp DIAG | Sample Diagnosis |
| Surg | Surgical |
| Tum % | Percentage of Tumor |
| W | White |
| WCAU | White Caucasian |

TABLE 1_8

| | | | sample_id | | | | | | | | |
|---|---|---|---|---|---|---|---|---|---|---|---|
| | | | (GCI)/ | | | | | | | | |
| | | | case id | TISSUE ID | | | | | | | |
| | | | (Asterand)/ | (GCI)/ | | | | | | | |
| | | | lot no. | specimen | Sample | | | | | | |
| | Source/ | sample | (old | ID | ID | | Diag | Specimen | | | |
| Tissue | Delivery | name | samples) | (Asterand) | (Asterand) | Diag | remarks | location | Gr | TNM | CS |
| CC | Asterand | 1-As- | 18036 | 31312 | 31312B1 | Aden | | Cec | 3 | TXN0M0 | 0 |
| | | AdenS0 | | | | | | | | | |
| CC | GCI | 2-GC- | 4QDH8 | 4QDH8ADT | | Aden | | Dis C | | | I |
| | | AdenoSI | | | | | | | | | |
| CC | Ichilov | 3-(7)-Ic- | CG-235 | | | AI | | Rectum | UN | | I |
| | | AdenoSI | | | | | | | | | |
| CC | GCI | 4-GC- | NTAI8 | NTAI8AOU | | Aden | | Cec | | | I |
| | | AdenoSI | | | | | | | | | |
| CC | GCI | 5-GC- | ARA7P | ARA7PAQA | | Aden | | Ret, | | | I |
| | | AdenoSI | | | | | | Low | | | |
| | | | | | | | | Ant | | | |
| CC | Ichilov | 6-(20)-Ic- | CG-249 | | | UA | | | 3 | | IIA |
| | | AdenoSIIA | | | | | | | | | |
| CC | GCI | 7-GC- | AFTS6 | AFTS6AP6 | | Aden | | | | | IIA |
| | | AdenoSIIA | | | | | | | | | |
| CC | GCI | 8-GC- | 5CYDK | 5CYDKACS | | Aden | | | | | IIA |
| | | AdenoSIIA | | | | | | | | | |
| CC | GCI | 9-GC- | XKSLS | XKSLSAF7 | | Aden | | | | | IIA |
| | | AdenoSIIA | | | | | | | | | |
| CC | GCI | 10-GC- | B4RU8 | B4RU8A8Q | | Aden | | | | | IIA |
| | | AdenoSIIA | | | | | | | | | |
| CC | GCI | 11-GC- | HB8EY | HB8EYA8I | | Aden | | | | | IIA |
| | | AdenoSIIA | | | | | | | | | |
| CC | Ichilov | 12-(22)- | CG-229C | | | Aden | | | 2 | | II |
| | | AdenoSII | | | | | | | | | |
| CC | GCI | 13-GC- | X8C7X | X8C7XATL | | Aden | | | | | IIA |
| | | AdenoSIIA | | | | | | | | | |
| CC | GCI | 14-GC- | HCP6K | HCP6KA8Z | | Aden | | | | | IIA |
| | | AdenoSIIA | | | | | | | | | |
| CC | GCI | 15-GC- | ZX4X7 | ZX4X7AXA | | Aden | | | | | IIA |
| | | AdenoSIIA | | | | | | | | | |
| CC | Asterand | 16-As- | 17915 | 31176 | 31176A1 | Aden | | | 2-3 | T3N0M0 | IIA |
| | | AdenoSIIA | | | | | | | | | |
| CC | Ichilov | 17-(1)-Ic- | CG-335 | | | Aden | | Cec | 2 | | IIA |
| | | AdenoSIIA | | | | | | | | | |
| CC | Asterand | 19-As- | 12772 | 18885 | 18885A1 | Aden | | rectum | 2 | T3NXM0 | IIA |
| | | AdenoSIIA | | | | | | | | | |
| CC | GCI | 20-GC- | JFYXP | JFYXPAMP | | Aden | | | | | IIA |
| | | AdenoSIIA | | | | | | | | | |
| CC | GCI | 21-GC- | OJXW9 | OJXW9ASR | | Aden | | | | | IIA |
| | | AdenoSIIA | | | | | | | | | |
| CC | Ichilov | 22-(28)- | CG-284 | | | Aden | | sigma | 2 | | IIA |
| | | Ic- | | | | | | | | | |
| | | AdenoSIIA | | | | | | | | | |
| CC | Ichilov | 23-(10)- | CG-311 | | | Aden | | Sig Col | 1-2 | | e IIA |
| | | Ic- | | | | | | | | | |
| | | AdenoSIIA | | | | | | | | | |
| CC | Ichilov | 24-(14)- | CG-222 (2) | | | WP | | Rectum | | | III |
| | | Ic- | | | | Aden | | | | | |
| | | AdenoSIII | | | | | | | | | |
| CC | Ichilov | 25-(23)- | CG-282 | | | MA | | sigma | UN | | III |
| | | Ic- | | | | | | | | | |
| | | AdenoSIII | | | | | | | | | |
| CC | GCI | 26-GC- | OTPI7 | OTPI7AWY | | Aden | | | | | III |
| | | AdenoSIII | | | | | | | | | |
| CC | GCI | 27-GC- | IG9NK | IG9NKAD3 | | MA | | | | | III |
| | | AdenoSIII | | | | | | | | | |
| CC | GCI | 28-GC- | 53OM7 | 53OM7AGL | | Aden | | | | | III |
| | | AdenoSIII | | | | | | | | | |
| CC | GCI | 29-GC- | BLUW6 | BLUW6A6Y | | Aden | | | | | III |
| | | AdenoSIII | | | | | | | | | |
| CC | GCI | 30-GC- | VZ6QA | VZ6QAAFA | | Aden | | RECTUM | | | III |
| | | AdenoSIII | | | | | | | | | |
| CC | Ichilov | 31-(6)-Ic- | CG-303 (3) | | | Aden | | | 1-2 | | III |
| | | AdenoSIII | | | | | | | | | |
| CC | Ichilov | 32-(2)-Ic- | CG-307 | | | Aden | | Cecum | 2 | | III |
| | | AdenoSIII | | | | | | | | | |
| CC | Ichilov | 33-(11)- | CG-337 | | | Aden | | | 1-2 | | III |
| | | Ic- | | | | | | | | | |
| | | AdenoSIII | | | | | | | | | |
| CC | Asterand | 34-As- | 18462 | 40971 | 40971A1 | TA | | Sig Col | 2 | TXN2M0 | IIIC |
| | | AdenoSIIIC | | | | | | | | | |
| CC | Ichilov | 35-(13)- | CG-290 | | | Aden | | Rect | 2 | | IV |
| | | Ic- | | | | | | Col | | | |
| | | AdenoSIV | | | | | | | | | |
| CC | GCI | 36-GC- | 7D7QV | 7D7QVAE6 | | Aden | | | | | IV |
| | | AdenoSIV | | | | | | | | | |
| CC | GCI | 37-GC- | 38U4V | 38U4VAA4 | | Aden | | | | | IV |
| | | AdenoSIV | | | | | | | | | |
| CC | Ichilov | 38-(9)-Ic- | CG-297 | | | Aden | | Rectum | 2 | | IV |
| | | AdenoSIV | | | | | | | | | |
| CC | Ichilov | 71-(16)- | CG-278C | | | Aden | | | 2 | | |
| | | Ic-Adeno | | | | | | | | | |
| CC | Ichilov | 72-(4)-Ic- | CG-276 | | | Carc | | | 3 | | |
| | | Adeno | | | | | | | | | |
| CC | Ichilov | 73-(17)- | CG-163 | | | Aden | | Rectum | 2 | | |
| | | Ic-Adeno | | | | | | | | | |
| CC | Ichilov | 74-(5)-Ic- | CG-308 | | | Aden | | Col Sig | 2 | | |
| | | Adeno | | | | | | | | | |
| CC | Ichilov | 75-(72)- | CG-309 | | | Aden | | | 3 | | |
| | | Ic-Adeno | | | | | | | | | |
| CC | Ichilov | 76-(18)- | CG-22C | | | Aden | | | UN | | |
| | | Ic-Adeno | | | | | | | | | |
| CC | Ichilov | 78-(21)- | CG-18C | | | Aden | | | UN | | |
| | | Ic-Adeno | | | | | | | | | |
| CC | Ichilov | 79-(24)- | CG-12 | | | Aden | | | UN | | |
| | | Ic-Adeno | | | | | | | | | |
| CC | Ichilov | 80-(25)- | CG-2 | | | Aden | | | UN | | |
| | | Ic-Adeno | | | | | | | | | |
| CC | biochain | 82-(61)- | A606258 | | | Aden, | | | 2 | | |
| | | Bc- | | | | Ulcer | | | | | |
| | | Adeno | | | | | | | | | |
| CC | biochain | 83-(57)- | A609150 | | | Aden | | | 3 | | |
| | | Bc- | | | | | | | | | |
| | | Adeno | | | | | | | | | |
| CC | biochain | 84-(56)- | A609148 | | | Aden | | | 2 | | |
| | | Bc- | | | | | | | | | |
| | | Adeno | | | | | | | | | |
| CN | GCI | 50-GC-N | XVPZ2 | XVPZ2NDD | | NC | Div | | | | |
| | | PS | | | | | | | | | |
| CN | GCI | 51-GC-N | CDSUV | CDSUVNR3 | | NC | CU | | | | |
| | | PS | | | | | | | | | |
| CN | GCI | 52-GC-N | GP5KH | GP5KHAOC | | NC | Div | | | | |
| | | PS | | | | | | | | | |
| CN | GCI | 53-GC-N | YUZNR | YUZNRNDN | | NC | Divs | Sig Col | | | |
| | | PS | | | | | | | | | |
| CN | GCI | 54-GC-N | 28QN6 | 28QN6NI1 | | NC | TS Aden | RT Col | | | |
| | | PS | | | | | | | | | |
| CN | GCI | 55-GC-N | GV6N8 | GV6N8NG9 | | NC | Divs, | | | | |
| | | PS | | | | | PA | | | | |
| CN | GCI | 56-GC-N | ZJ17R | ZJ17RNIH | | NC | Tub | RT Col | | | |
| | | PS | | | | | Aden | | | | |
| CN | GCI | 57-GC-N | 2EEBJ | 2EEBJN2Q | | NC | Div/Chr | | | | |
| | | PS | | | | | Infl | | | | |
| CN | GCI | 58-GC-N | 68IX5 | 68IX5N1H | | NC | Chr Div | LT Col | | | |
| | | PS | | | | | | | | | |
| CN | GCI | 59-GC-N | 9GEGL | 9GEGLN1V | | NC | Ext | Sig Col | | | |
| | | PS | | | | | Divs | | | | |
| CN | GCI | 60-GC-N | PKU8O | PKU8OAJ3 | | NC | Divs, | Sig Col | | | |
| | | PS | | | | | Chr | | | | |
| | | | | | | | Div . . . | | | | |
| CN | Asterand | 61-As-N | 22903 | 74452 | 74452B1 | NC | MU | | | | |
| | | PS | | | | | w/MI | | | | |
| CN | Asterand | 62-As-N | 16364 | 31802 | 31802B1 | NC | UC | | | | |
| | | PS | | | | | | | | | |
| CN | biochain | 63-(65)- | A607115 | | | N-PM | PM | | | | |
| | | Bc-N PM | | | | | | | | | |
| CN | Ambion | 64-(71)- | 071P10B | | | N-PM | PM | | | | |
| | | Am-N | | | | | | | | | |
| | | PM | | | | | | | | | |
| CN | biochain | 65-(66)- | A609262 | | | N-PM | PM | | | | |
| | | Bc-N PM | | | | | | | | | |
| CN | biochain | 66-(63)- | A609260 | | | N-PM | PM | | | | |
| | | Bc-N PM | | | | | | | | | |
| CN | biochain | 67-(62)- | A608273 | | | N-PM | PM | | | | |
| | | Bc-N PM | | | | | | | | | |
| CN | biochain | 68-(64)- | A609261 | | | N-PM | PM | | | | |
| | | Bc-N PM | | | | | | | | | |
| CN | biochain | 69-(41)- | A501156 | | | N-PM | PM | | | | |
| | | Bc-N PM | | | | | | | | | |
| CN | biochain | 70-(67)- | A406029 + | | | N-PM | PM | | | | |
| | | Bc-N PM | A411078 | | | P10 | | | | | |

| | | | | | | | | | | Dr. | | | |
|---|---|---|---|---|---|---|---|---|---|---|---|---|---|
| | | | | | | HT | WT | | Alcohol | per | Alc. | Recovery | Exc. |
| Tissue | CS2 | Tumor % | Gender | age | Ethnic B | (CM) | (KG) | BMI | Status | day | Dur. | Type | Y. |
| CC | | 80 | F | 43 | CAU | 169 | 65 | 22.8 | NU | | | Auto | 2004 |
| CC | Duke A | 85 | F | 44 | WCAU | 170 | 61.2 | 21.1 | Y | 4 | | Surg | |
| CC | Duke A | | F | 66 | | | | | | | | | |
| CC | Duke | 80 | M | 53 | WCAU | 180 | 110 | 33.9 | Y | — | | Surg | |
| | B1 | | | | | | | | | | | | |
| CC | Duke | 70 | F | 70 | WCAU | 165 | 66 | 24.2 | Y | 0 | | Surg | |
| | B1 | | | | | | | | | | | | |
| CC | Duke | | M | 36 | | | | | | | | | |
| | B2 | | | | | | | | | | | | |
| CC | Duke | 75 | M | 39 | WCAU | 191 | 77.1 | 21.2 | N | 0 | | Surg | |
| | B2 | | | | | | | | | | | | |
| CC | Duke | 65 | M | 44 | WCAU | 183 | 120 | 35.8 | N | — | | Surg | |
| | B2 | | | | | | | | | | | | |
| CC | Duke | 65 | M | 48 | WCAU | 188 | 83 | 23.5 | Y | 10 | | Surg | |
| | B2 | | | | | | | | | | | | |
| CC | Duke | 65 | F | 50 | WCAU | 165 | 79.8 | 29.3 | N | — | | Surg | |
| | B2 | | | | | | | | | | | | |
| CC | Duke | 65 | M | 53 | WCAU | 191 | 147 | 40.5 | N | — | | Surg | |
| | B2 | | | | | | | | | | | | |
| CC | Duke B | | F | 55 | | | | | | | | | |
| CC | Duke | 90 | M | 56 | WCAU | 178 | 116 | 36.6 | N | — | | Surg | |
| | B2 | | | | | | | | | | | | |
| CC | Duke | 80 | M | 58 | WCAU | 180 | 89.4 | 27.5 | Y | 4 | | Surg | |
| | B2. | | | | | | | | | | | | |
| CC | Duke | 90 | M | 60 | WCAU | 178 | 63.5 | 20.1 | Y | 5 | | Surg | |
| | B2 | | | | | | | | | | | | |
| CC | Duke | 60 | F | 64 | CAU | 171 | 82 | 28.0 | occ | 1 | 21-30 | Auto | 2004 |
| | B2 | | | | | | | | | drink/ | years | | |
| | | | | | | | | | | week | | | |
| CC | Duke | | F | 66 | | | | | | | | | |
| | B2 | | | | | | | | | | | | |
| CC | Duke | 60 | F | 67 | CAU | 164 | 76 | 28.3 | NU | | | Surg | 2004 |
| | B2 | | | | | | | | | | | | |
| CC | Duke | 60 | F | 68 | WCAU | 165 | 58.5 | 21.5 | Y | — | | Surg | |
| | B2 | | | | | | | | | | | | |
| CC | Duke | 90 | F | 69 | WCAU | 165 | 113 | 41.5 | N | — | | Surg | |
| | B2 | | | | | | | | | | | | |
| CC | Duke | | F | 72 | | | | | | | | | |
| | B2 | | | | | | | | | | | | |
| CC | Duke | | M | 88 | | | | | | | | | |
| | B2 | | | | | | | | | | | | |
| CC | Duke C | | F | 49 | | | | | | | | | |
| CC | Duke C | | M | 51 | | | | | | | | | |
| CC | Duke | 70 | F | 54 | WCAU | 155 | 58 | 24.1 | N | — | | Surg | |
| | C2 | | | | | | | | | | | | |
| CC | Duke | 90 | F | 54 | WCAU | 163 | 81.6 | 30.9 | N | — | | Surg | |
| | C2 | | | | | | | | | | | | |
| CC | Duke | 75 | F | 61 | WCAU | 183 | 107 | 31.9 | N | — | | Surg | |
| | C2 | | | | | | | | | | | | |
| CC | Duke | 85 | F | 64 | WCAU | 165 | 68.9 | 25.3 | N | — | | Surg | |
| | C2 | | | | | | | | | | | | |
| CC | Duke | 60 | M | 67 | WCAU | 180 | 71.7 | 22.0 | Y | 14 | | Surg | |
| | C2 | | | | | | | | | | | | |
| CC | Duke | | F | 77 | | | | | | | | | |
| | C2. | | | | | | | | | | | | |
| CC | Duke | | F | 89 | | | | | | | | | |
| | C2. | | | | | | | | | | | | |
| CC | Duke | | NA | NA | | | | | | | | | |
| | C2. | | | | | | | | | | | | |
| CC | | 76 | F | 68 | CAU | 165 | 82 | 30.1 | NU | | | Surg | 2005 |
| CC | Duke | | M | 47 | | | | | | | | | |
| | D. | | | | | | | | | | | | |
| CC | Duke D | 80 | F | 52 | WCAU | 163 | 63.5 | 24.0 | Y | 3 | | Surg | |
| CC | Duke D | 85 | F | 53 | WCAU | 173 | 78.9 | 26.5 | | — | | Surg | |
| CC | Duke | | M | 62 | | | | | | | | | |
| | D. | | | | | | | | | | | | |
| CC | UN | 50 | F | 60 | | | | | | | | | |
| CC | UN | 75 | M | 64 | | | | | | | | | |
| CC | UN | | M | 73 | | | | | | | | | |
| CC | UN | | F | 80 | | | | | | | | | |
| CC | UN | | F | 88 | | | | | | | | | |
| CC | UN | | NA | NA | | | | | | | | | |
| CC | UN | | NA | NA | | | | | | | | | |
| CC | UN | | NA | NA | | | | | | | | | |
| CC | UN | | NA | NA | | | | | | | | | |
| CC | UN | | M | 41 | | | | | | | | | |
| CC | UN | | F | 45 | | | | | | | | | |
| CC | UN | 40 | F | 48 | | | | | | | | | |
| CN | | 0 | F | 55 | WCAU | 168 | 87.1 | 31.0 | N | — | | Surg | |
| CN | | 0 | M | 55 | WCAU | 178 | 92.1 | 29.1 | N | — | | Surg | |
| CN | | 0 | F | 57 | WCAU | 165 | 73 | 26.8 | Y | 6 | | Surg | |
| CN | | 0 | F | 57 | WCAU | 175 | 94.8 | 31.0 | Y | 1 | | Surg | |
| CN | | 0 | M | 59 | WCAU | 185 | 105 | 30.7 | Y | 42 | | Surg | |
| CN | | 0 | F | 61 | WCAU | 160 | 61.7 | 24.1 | Y | 3 | | Surg | |
| CN | | 0 | M | 61 | WCAU | 175 | 92.1 | 30.0 | Y | — | | Surg | |
| CN | | 0 | F | 66 | WCAU | 160 | 62 | 24.2 | Y | 4 | | Surg | |
| CN | | 0 | F | 66 | WCAU | 155 | 58.1 | 24.2 | N | — | | Surg | |
| CN | | 0 | M | 68 | WCAU | 178 | 74.8 | 23.7 | N | — | | Surg | |
| CN | | 0 | F | 69 | WCAU | 157 | 77.6 | 31.3 | N | — | | Surg | |
| CN | | 0 | M | 71 | CAU | 173 | 116 | 38.8 | Occ | | | Surg | 2005 |
| CN | | 0 | F | 74 | WCAU | 157 | 63 | 25.6 | Occ | | | Surg | 2004 |
| CN | | | M | 24 | | | | | | | | | |
| CN | | | F | 34 | | | | | | | | | |
| CN | | | M | 58 | | | | | | | | | |
| CN | | | M | 61 | | | | | | | | | |
| CN | | | M | 66 | | | | | | | | | |
| CN | | | F | 68 | | | | | | | | | |
| CN | | | M | 78 | | | | | | | | | |
| CN | | | F&M | M | | | | | | | | | |
| | | | | (26-78) | | | | | | | | | |
| | | | | &F | | | | | | | | | |
| | | | | (53-77). | | | | | | | | | |

TABLE 1_8_1

| Key | Full Name |
|---|---|
| CC | Colon Cancer |
| CB | Colon Benign |
| CN | Colon Normal |
| WT | Weight |
| HT | Height |
| Aden | Adenocarcinoma |
| AI | Adenocarcinoma intramucosal |
| UA | Ulcerated adenocarcinoma |
| WP Aden | Well polypoid adeocarcinoma |
| MA | Mucinus adenocarcinoma |
| TA | Tubular adenocarcinoma |
| Carc | Carcinoma |
| TS Aden | TUBULOVILLOUS ADENOMA |
| TS Aden HGD | TUBULOVILLOUS ADENOMA with HIGH |
| | GRADE DYSPLASIA |
| NC | Normal Colon |
| N-PM | Normal PM |
| N-PM P10 | Normal PM (Pool 10) |
| Diag | Diagnosis |
| Div | DIVERTICULITIS |
| Divs w/F DIV | Diverticulosis with Focal DIVERTICULITIS |
| Chr Divs | Chronic diverticulosis |
| Divs w/DIV . . . | DIVERTICULOSIS WITH DIVERTICULITIS |
| | AND FOCAL ABSCESS FORMATION; NO |
| | MALIGNANCY |
| AD w/AF | Acute diverticulitis with abscess formation |
| CU | CECAL ULCERATION |
| Divs, PA | DIVERTICULOSIS AND PERICOLIC ABSCESS |
| Tub Aden | TUBULAR ADENOMA |
| Div/Chr Infl | DIVERTICULOSIS/CHRONIC INFLAMMATION |
| Chr Div | CHRONIC DIVERTICULITIS |
| Ext Divs | EXTENSIVE DIVERTICULOSIS |
| Divs, Chr Div . . . | DIVERTICULOSIS AND CHRONIC |
| | DIVERTICULITIS, SEROSAL FIBROSIS |
| | AND CHRONIC SEROSITIS |
| MU w/MI | Mucosal ulceration with mural inflammation |
| UC | Ulcerative colitis |
| Cec | cecum |
| Dis C | DISTAL COLON |
| Ret, Low Ant | RETROSIGMOID, LOW ANTERIOR |
| Rect Col | Rectosigmoidal colon |
| Sig col | Sigmod colon |
| Col Sig | Colon Sigma |
| RT Col | RIGHT COLON |
| Prox T Col | PROXIMAL TRANSVERSE COLON |
| LT Col | Left Colon |
| Gr | Grade |
| CS | Cancer Stage |
| Ethnic B | Ethnic background |
| NU | Never Used |
| Occ | Occasion |
| Cur U | Current use |
| Dr. per day | Drinks per day |
| Alc. Dur. | Alcohol Duration |
| Auto. | Autopsy |
| Surg. | Surgical |
| Exc. Y. | Excision Year |

TABLE 1_9
Tissue samples in normal panel:

| | Lot no. | Source | Tissue | Pathology | Sex/Age |
|---|---|---|---|---|---|
| 1-Am-Colon (C71) | 071P10B | Ambion | Colon | PM IC bleed | F/43 |
| 2-B-Colon (C69) | A411078 | Biochain | Colon | PM-Pool of 10 | M(26-78)&F(53-77) |
| 3-Cl-Colon (C70) | 1110101 | Clontech | Colon | PM-Pool of 3 sudden death | M&F(20-50) |
| 4-Am-Small Intestine | 091P0201A | Ambion | Small Intestine | PM ICH | M/85 |
| 5-B-Small Intestine | A501158 | Biochain | Small Intestine | PM | M/63 |
| 6-B-Rectum | A605138 | Biochain | Rectum | PM | M/25 |
| 7-B-Rectum | A610297 | Biochain | Rectum | PM | M/24 |
| 8-B-Rectum | A610298 | Biochain | Rectum | PM | M/27 |
| 9-Am-Stomach | 110P04A | Ambion | Stomach | PM GSW | M/16 |
| 10-B-Stomach | A501159 | Biochain | Stomach | PM | M/24 |
| 11-B-Esophagus | A603814 | Biochain | Esophagus | PM | M/26 |
| 12-B-Esophagus | A603813 | Biochain | Esophagus | PM | M/41 |
| 13-Am-Pancreas | 071P25C | Ambion | Pancreas | PM MVA | F/25 |
| 14-CG-Pancreas | CG-255-2 | Ichilov | Pancreas | PM | M/75 |
| 15-B-Lung | A409363 | Biochain | Lung | PM-Pool of 5 | M(24-28)&F62 |
| 16-Am-Lung (L93) | 111P0103A | Ambion | Lung | PM ICH | F/61 |
| 17-B-Lung (L92) | A503204 | Biochain | Lung | PM | M/28 |
| 19-B-Ovary (O48) | A504087 | Biochain | Ovary | PM | F/51 |
| 20-B-Ovary (O46) | A504086 | Biochain | Ovary | PM | F/41 |
| 75-G-Ovary | L629FRV1 | GCI | Ovary | PS DIGESTIVE HEMORRHAGE | F/47 |
| | | | | (ALCOHOLISM) | |
| 76-G-Ovary | DWHTZRQX | GCI | Ovary | PS LEIOMYOMAS | F/42 |
| 77-G-Ovary | FDPL9NJ6 | GCI | Ovary | PS VAGINAL BLEEDING | F/56 |
| 78-G-Ovary | GWXUZN5M | GCI | Ovary | PS ABNORMAL PAP SMEARS | F/53 |
| 21-Am-Cervix | 101P0101A | Ambion | Cervix | PM Surgery | F/40 |
| 23-B-Cervix | A504089 | Biochain | Cervix | PM-Pool of 5 | F(36-55) |
| 24-B-Uterus | A411074 | Biochain | Uterus | PM-Pool of 10 | F(32-53) |
| 25-B-Uterus | A409248 | Biochain | Uterus | PM | F/35 |
| 26-B-Uterus | A504090 | Biochain | Uterus | PM-Pool of 5 | F(40-53) |
| 28-Am-Bladder | 071P02C | Ambion | Bladder | PM GSW | M/28 |
| 29-B-Bladder | A504088 | Biochain | Bladder | PM-Pool of 5 | M(26-44)&F30 |
| 30-Am-Placenta | 021P33A | Ambion | Placenta | PB | F/33 |
| 31-B-Placenta | A410165 | Biochain | Placenta | PB | F/26 |
| 32-B-Placenta | A411073 | Biochain | Placenta | PB-Pool of 5 | F(24-30) |
| 33-B-Breast (B59) | A607155 | Biochain | Breast | PM | F/36 |
| 34-Am-Breast (B63) | 26486 | Ambion | Breast | PS bilateral breast reduction | F/43 |
| 35-Am-Breast (B64) | 23036 | Ambion | Breast | PM lung cancer | F/57 |
| 36-Cl-Prostate (P53) | 1070317 | Clontech | Prostate | PM-Pool of 47 sudden death | M(14-57) |
| 37-Am-Prostate | 061P04A | Ambion | Prostate | PM IC bleed | M/47 |
| (P42) | | | | | |
| 38-Am-Prostate | 25955 | Ambion | Prostate | PM head trauma | M/62 |
| (P59) | | | | | |
| 39-Am-Testis | 111P0104A | Ambion | Testis | PM GSW | M/25 |
| 40-B-Testis | A411147 | Biochain | Testis | PM | M/74 |
| 41-Cl-Testis | 1110320 | Clontech | Testis | PM-Pool of 45 sudden death | M(14-64) |
| 42-CG-Adrenal | CG-184-10 | Ichilov | Adrenal | PM | F/81 |
| 43-B-Adrenal | A610374 | Biochain | Adrenal | PM | F/83 |
| 44-B-Heart | A411077 | Biochain | Heart | PM-Pool of 5 | M(23-70) |
| 45-CG-Heart | CG-255-9 | Ichilov | Heart focal | PM | M/75 |
| | | | fibrosis | | |
| 46-CG-Heart | CG-227-1 | Ichilov | Heart | PM | F/36 |
| 47-Am-Liver | 081P0101A | Ambion | Liver | PM ICH | M/64 |
| 48-CG-Liver | CG-93-3 | Ichilov | Liver | PM | F/19 |
| 49-CG-Liver | CG-124-4 | Ichilov | Liver of fetus | PM | fetus |
| 50-Cl-BM | 1110932 | Clontech | Bone Marrow | PM-Pool of 8 sudden death | M&F(22-65) |
| 51-CGEN-Blood | WBC#5 | CGEN | Blood | — | M |
| 52-CGEN-Blood | WBC#4 | CGEN | Blood | — | M |
| 53-CGEN-Blood | WBC#3 | CGEN | Blood | — | M |
| 54-CG-Spleen | CG-267 | Ichilov | Spleen | PM | F/25 |
| 55-CG-Spleen | 111P0106B | Ambion | Spleen | PM GSW | M/25 |
| 56-CG-Spleen | A409246 | Biochain | Spleen | PM | F/12 |
| 57-CG-Thymus | CG-98-7 | Ichilov | Thymus | PM | F/28 |
| 58-Am-Thymus | 101P0101A | Ambion | Thymus | PM head injury | M/14 |
| 59-B-Thymus | A409278 | Biochain | Thymus | PM | M/28 |
| 60-B-Thyroid | A610287 | Biochain | Thyroid | PM | M/27 |
| 61-B-Thyroid | A610286 | Biochain | Thyroid | PM | M/24 |
| 62-CG-Thyroid | CG-119-2 | Ichilov | Thyroid | PM | F/66 |
| 63-Cl-Salivary Gland | 1070319 | Clontech | Salivary Gland | PM-Pool of 24 sudden death | M&F15-60 |
| 64-Am-Kidney | 111P0101B | Ambion | Kidney | PM ICH | M60 |
| 65-Cl-Kidney | 1110970 | Clontech | Kidney | PM-Pool of 14 sudden death | M&F18-59 |
| 66-B-Kidney | A411080 | Biochain | Kidney | PM-Pool of 5 | M24-46 |
| 67-CG-Cerebellum | CG-183-5 | Ichilov | Cerebellum | PM | M/74 |
| 68-CG-Cerebellum | CG-212-5 | Ichilov | Cerebellum | PM | M/54 |
| 69-B-Brain | A411322 | Biochain | Brain | PM | M/28 |
| 70-Cl-Brain | 1120022 | Clontech | Brain | PM | — |
| 71-B-Brain | A411079 | Biochain | Brain | PM-Pool of 2 | M27-28 |
| 72-CG-Brain | CG-151-1 | Ichilov | Brain | PM | F/86 |
| 73-Am-Skeletal | 101P013A | Ambion | Skeletal Muscle | PM head injury | F/28 |
| Muscle | | | | | |
| 74-Cl-Skeletal | 1061038 | Clontech | Skeletal Muscle | PM-Pool of 2 sudden death | M&F43-46 |
| Muscle | | | | | |

TABLE 1_10

| | | Sample id(GCI)/case id | Tissue id (GCI)/Specimen | Sample id (Asterand)/ |
|---|---|---|---|---|
| sample name | Source | (Asterand) Lot no. | id (Asternd) | RNA id (GCI) |
| 1-(7)-Bc-Rectum | Biochain | A610297 | | |
| 2-(8)-Bc-Rectum | Biochain | A610298 | | |
| 3-GC-Colon | GCI | CDSUV | CDSUVNR3 | |
| 4-As-Colon | Asterand | 16364 | 31802 | 31802B1 |
| 5-As-Colon | Asterand | 22900 | 74446 | 74446B1 |
| 6-GC-Small bowl | GCI | V9L7D | V9L7DN6Z | |
| 7-GC-Small bowl | GCI | M3GVT | M3GVTN5R | |
| 8-GC-Small bowl | GCI | 196S2 | 196S2AJN | |
| 9-(9)-Am-Stomach | Ambion | 110P04A | | |
| 10-(10)-Bc-Stomach | Biochain | A501159 | | |
| 11-(11)-Bc-Esoph | Biochain | A603814 | | |
| 12-(12)-Bc-Esoph | Biochain | A603813 | | |
| 13-As-Panc | Asterand | 8918 | 9442 | 9442C1 |
| 14-As-Panc | Asterand | 10082 | 11134 | 11134B1 |
| 15-(48)-Ic-Liver | Ichilov | CG-93-3 | | |
| 16-As-Liver | Asterand | 7916 | 7203 | 7203B1 |
| 17-(28)-Am-Bladder | Ambion | 071P02C | | |
| 18-(29)-Bc-Bladder | Biochain | A504088 | | |
| 19-(64)-Am-Kidney | Ambion | 111P0101B | | |
| 20-(65)-CI-Kidney | Clontech | 1110970 | | |
| 21-(66)-Bc-Kidney | Biochain | A411080 | | |
| 22-GC-Kidney | GCI | N1EVZ | N1EVZN91 | |
| 23-GC-Kidney | GCI | BMI6W | BMI6WN9F | |
| 24-(42)-Ic-Adrenal | Ichilov | CG-184-10 | | |
| 25-(43)-Bc-Adrenal | Biochain | A610374 | | |
| 26-(16)-Am-Lung | Ambion | 111P0103A | | |
| 27-(17)-Bc-Lung | Biochain | A503204 | | |
| 28-As-Lung | Asterand | 9078 | 9275 | 9275B1 |
| 29-As-Lung | Asterand | 6692 | 6161 | 6161A1 |
| 30-As-Lung | Asterand | 7900 | 7180 | 7180F1 |
| 31-(75)-GC-Ovary | GCI | L629FRV1 | | |
| 32-(76)-GC-Ovary | GCI | DWHTZRQX | | |
| 33-(77)-GC-Ovary | GCI | FDPL9NJ6 | | |
| 34-(78)-GC-Ovary | GCI | GWXUZN5M | | |
| 35-(21)-Am-Cerix | Ambion | 101P0101A | | |
| 36-GC-cervix | GCI | E2P2N | E2P2NAP4 | |
| 37-(24)-Bc-Uterus | Biochain | A411074 | | |
| 38-(26)-Bc-Uterus | Biochain | A504090 | | |
| 39-(30)-Am-Placen | Ambion | 021P33A | | |
| 40-(32)-Bc-Placen | Biochain | A411073 | | |
| 41-GC-Breast | GCI | DHLR1 | | |
| 42-GC-Breast | GCI | TG6J6 | | |
| 43-GC-Breast | GCI | E6UDD | E6UDDNCF | |
| 44-(38)-Am-Prostate | Ambion | 25955 | | |
| 45-Bc-Prostate | Biochain | A609258 | | |
| 46-As-Testis | Asterand | 13071 | 19567 | 19567B1 |
| 47-As-Testis | Asterand | 19671 | 42120 | 42120A1 |
| 48-GC-Artery | GCI | 7FUUP | 7FUUPAMP | |
| 49-GC-Artery | GCI | YGTVY | YGTVYAIN | |
| 50-Th-Blood-PBMC | Tel- | 52497 | | |
| | Hashomer | | | |
| 51-Th-Blood-PBMC | Tel- | 31055 | | |
| | Hashomer | | | |
| 52-Th-Blood-PBMC | Tel- | 31058 | | |
| | Hashomer | | | |
| 53-(54)-Ic-Spleen | Ichilov | CG-267 | | |
| 54-(55)-Ic-Spleen | Ichilov | 111P0106B | | |
| 55-(57)-Ic-Thymus | Ichilov | CG-98-7 | | |
| 56-(58)-Am-Thymus | Ambion | 101P0101A | | |
| 57-(60)-Bc-Thyroid | Biochain | A610287 | | |
| 58-(62)-Ic-Thyroid | Ichilov | CG-119-2 | | |
| 59-Gc-Sali gland | GCI | NNSMV | NNSMVNJC | |
| 60-(67)-Ic-Cerebellum | Ichilov | CG-183-5 | | |
| 61-(68)-Ic-Cerebellum | Ichilov | CG-212-5 | | |
| 62-(69)-Bc-Brain | Biochain | A411322 | | |
| 63-(71)-Bc-Brain | Biochain | A411079 | | |
| 64-(72)-Ic-Brain | Ichilov | CG-151-1 | | |
| 65-(44)-Bc-Heart | Biochain | A411077 | | |
| 66-(46)-Ic-Heart | Ichilov | CG-227-1 | | |
| 67-(45)-Ic-Heart | Ichilov | CG-255-9 | | |
| (Fibrotic) | | | | |
| 68-GC-Skel Mus | GCI | T8YZS | T8YZSN7O | |
| 69-GC-Skel Mus | GCI | Q3WKA | Q3WKANCJ | |
| 70-As-Skel Mus | Asterand | 8774 | 8235 | 8235G1 |
| 71-As-Skel Mus | Asterand | 8775 | 8244 | 8244A1 |
| 72-As-Skel Mus | Asterand | 10937 | 12648 | 12648C1 |
| 73-As-Skel Mus | Asterand | 6692 | 6166 | 6166A1 |

### Materials and Experimental Procedures

[0710] RNA preparation—RNA was obtained from ABS (Wilmington, Del. 19801, USA, absbioreagents.com), BioChain Inst. Inc. (Hayward, Calif. 94545 USA biochain.com), GOG for ovary samples—Pediatic Cooperative Human Tissue Network, Gynecologic Oncology Group Tissue Bank, Children Hospital of Columbus (Columbus Ohio 43205 USA), Clontech (Franklin Lakes, N.J. USA 07417, clontech.com), Ambion (Austin, Tex. 78744 USA, ambion.com), Asternad (Detroit, Mich. 48202-3420, USA, asterand.com), and from Genomics Collaborative Inc. a Division of Seracare (Cambridge, Mass. 02139, USA, .genomicsinc.com). Alternatively, RNA was generated from tissue samples using TRI-Reagent (Molecular Research Center), according to Manufacturer's instructions. Tissue and RNA samples were obtained from patients or from postmortem. Total RNA samples were treated with DNaseI (Ambion).

[0711] RT PCR—Purified RNA (1 μg) was mixed with 150 ng Random Hexamer primers (Invitrogen) and 500 μM dNTP in a total volume of 15.6 μl. The mixture was incubated for 5 min at 65° C. and then quickly chilled on ice. Thereafter, 5 μl of 5× SuperscriptII first strand buffer (Invitrogen), 2.41 μl 0.1M DTT and 40 units RNasin (Promega) were added, and the mixture was incubated for 10 min at 25° C., followed by further incubation at 42° C. for 2 min. Then, 1 μl (200 units) of SuperscriptII (Invitrogen) was added and the reaction (final volume of 25 μl) was incubated for 50 min at 42° C. and then inactivated at 70° C. for 15 min. The resulting cDNA was diluted 1:20 in TE buffer (10 mM Tris pH=8, 1 mM EDTA pH=8).

[0712] Real-Time RT-PCR analysis—cDNA (511), prepared as described above, was used as a template in Real-Time PCR reactions using the SYBR Green I assay (PE Applied Biosystem) with specific primers and UNG Enzyme (Eurogentech or ABI or Roche). The amplification was effected as follows: 50° C. for 2 min, 95° C. for 10 min, and then 40 cycles of 95° C. for 15 sec, followed by 60° C. for 1 min. Detection was performed by using the PE Applied Biosystem SDS 7000. The cycle in which the reactions achieved a threshold level (Ct) of fluorescence was registered and was used to calculate the relative transcript quantity in the RT reactions. Non-detected samples were assigned Ct value of 41 and were calculated accordingly. The relative quantity was calculated using the equation Q=efficiencŷ^{-Ct}. The efficiency of the PCR reaction was calculated from a standard curve, created by using serial dilutions of several reverse transcription (RT) reactions prepared from RNA purified from 5 cell lines (HCT116, H1299, DU145, MCF7, ES-2). To minimize inherent differences in the RT reaction, the resulting relative quantities were normalized to normalization factor calculated in one of the following methods as indicated in the text:

[0713] Method 1—the geometric mean of the relative quantities of the selected housekeeping (HSKP) genes was used as normalization factor.

[0714] Method 2—The expression of several housekeeping (HSKP) genes was checked on every panel. The relative quantity (Q) of each housekeeping gene in each sample, calculated as described above, was divided by the median quantity of this gene in all panel samples to obtain the “relative Q rel to MED”. Then, for each sample the median of the “relative Q rel to MED” of the selected housekeeping genes was calculated and served as normalization factor of this sample for further calculations. Schematic summary of quantitative real-time PCR analysis is presented in FIG. 3. As shown, the x-axis shows the cycle number. The C_{T}=Threshold Cycle point, which is the cycle that the amplification curve crosses the fluorescence threshold that was set in the experiment. This point is a calculated cycle number in which PCR products signal is above the background level (passive dye ROX) and still in the Geometric/Exponential phase (as shown, once the level of fluorescence crosses the measurement threshold, it has a geometrically increasing phase, during which measurements are most accurate, followed by a linear phase and a plateau phase; for quantitative measurements, the latter two phases do not provide accurate measurements). The y-axis shows the normalized reporter fluorescence. It should be noted that this type of analysis provides relative quantification.

[0715] The sequences of the housekeeping genes measured in all the examples on ovarian cancer panel were as follows:

SDHA (GenBank Accession No. NM_004168
(SEQ ID NO: 335);
SDHA Forward primer (SEQ ID NO: 297):
TGGGAACAAGAGGGCATCTG
SDHA Reverse primer (SEQ ID NO: 298):
CCACCACTGCATCAAATTCATG
SDHA-amplicon (SEQ ID NO: 299):
TGGGAACAAGAGGGCATCTGCTAAAGTTTCAGATTCCATTTCTGCTCAGT
ATCCAGTAGTGGATCATGAATTTGATGCAGTGGTGG
PBGD (GenBank Accession No. BC019323
(SEQ ID NO: 336)),
PBGD Forward primer (SEQ ID NO: 300):
TGAGAGTGATTCGCGTGGG
PBGD Reverse primer (SEQ ID NO: 301):
CCAGGGTACGAGGCTTTCAAT
PBGD-amplicon (SEQ ID NO: 302):
TGAGAGTGATTCGCGTGGGTACCCGCAAGAGCCAGCTTGCTCGCATACAG
ACGGACAGTGTGGTGGCAACATTGAAAGCCTCGTACCCTGG
HPRT1 (GenBank Accession No. NM_000194
(SEQ ID NO: 337)),
HPRT1 Forward primer (SEQ ID NO: 303):
TGACACTGGCAAAACAATGCA
HPRT1 Reverse primer (SEQ ID NO: 304):
GGTCCTTTTCACCAGCAAGCT
HPRT1-amplicon (SEQ ID NO: 305) (SEQ ID NO: 305):
TGACACTGGCAAAACAATGCAGACTTTGCTTTCCTTGGTCAGGCAGTATA
ATCCAAAGATGGTCAAGGTCGCAAGCTTGCTGGTGAAAAGGACC
GAPDH (GenBank Accession No. BC026907
(SEQ ID NO: 338))
GAPDH Forward primer (SEQ ID NO: 306):
TGCACCACCAACTGCTTAGC
GAPDH Reverse primer (SEQ ID NO: 307):
CCATCACGCCACAGTTTCC
GAPDH-amplicon (SEQ ID NO: 308):
TGCACCACCAACTGCTTAGCACCCCTGGCCAAGGTCATCCATGACAACTT
TGGTATCGTGGAAGGACTCATGACCACAGTCCATGCCATCACTGCCACCC
AGAAGACTGTGGATGG

[0716] The sequences of the housekeeping genes measured in all the examples on colon cancer tissue testing panel were as follows:

PBGD (GenBank Accession No. BC019323
(SEQ ID NO: 336)),
PBGD Forward primer (SEQ ID NO: 300):
TGAGAGTGATTCGCGTGGG
PBGD Reverse primer (SEQ ID NO: 301):
CCAGGGTACGAGGCTTTCAAT
PBGD-amplicon (SEQ ID NO: 302):
TGAGAGTGATTCGCGTGGGTACCCGCAAGAGCCAGCTTGCTCGCATACAG
ACGGACAGTGTGGTGGCAACATTGAAAGCCTCGTACCCTGG
HPRT1 (GenBank Accession No. NM_000194
(SEQ ID NO: 337)),
HPRT1 Forward primer (SEQ ID NO: 303):
TGACACTGGCAAAAGAATGCA
HPRT1 Reverse primer (SEQ ID NO: 304):
GGTCCTTTTCACCAGCAAGCT
HPRT1-amplicon (SEQ ID NO: 305) (SEQ ID NO: 305):
TGACACTGGCAAAACAATGCAGACTTTGCTTTCCTTGGTCAGGCAGTATA
ATCCAAAGATGGTCAAGGTCGCAAGCTTGCTGGTGAAAAGGACC
G6PD (GenBank Accession No. NM_000402
(SEQ ID NO: 339))
G6PD Forward primer (SEQ ID NO: 309):
gaggccgtcaccaagaacat
G6PD Reverse primer (SEQ ID NO: 310):
ggacagccggtcagagctc
G6PD-amplicon (SEQ ID NO: 311):
gaggccgtcaccaagaacattcacgagtcctgcatgagccagataggctg
gaaccgcatcatcgtggagaagcccttcgggagggacctgcagagctctg
accggctgtcc
RPS27A (GenBank Accession No. NM_002954
(SEQ ID NO: 340))
RPS27A Forward primer (SEQ ID NO: 312):
CTGGCAAGCAGCTGGAAGAT
RPS27A Reverse primer (SEQ ID NO: 313):
TTTCTTAGCACCACCACGAAGTC
RPS27A-amplicon (SEQ ID NO: 314):
CTGGCAAGCAGCTGGAAGATGGACGTACTTTGTCTGACTACAATATTCAA
AAGGAGTCTACTCTTCATCTTGTGTTGAGACTTCGTGGTGGTGCTAAGAA
A

[0717] The sequences of the housekeeping genes measured in all the examples in the lung panel were as follows:

Ubiquitin (GenBank Accession No. BC000449
(SEQ ID NO: 341))
Ubiquitin Forward primer (SEQ ID NO: 315):
ATTTGGGTCGCGGTTCTTG
Ubiquitin Reverse primer (SEQ ID NO: 316):
TGCCTTGACATTCTCGATGGT
Ubiquitin-amplicon (SEQ ID NO: 317)
ATTTGGGTCGCGGTTCTTGTTTGTGGATCGCTGTGATCGTCACTTGACAA
TGCAGATCTTCGTGAAGACTCTGACTGGTAAGACCATCACCCTCGAGG T
TGAGCCCAGTGACACCATCGAGAATGTCAAGGCA
SDHA (GenBank Accession No. NM_004168
(SEQ ID NO: 335))
SDHA Forward primer (SEQ ID NO: 297):
TGGGAACAAGAGGGCATCTG
SDHA Reverse primer (SEQ ID NO: 298):
CCACCACTGCATCAAATTCATG
SDHA-amplicon (SEQ ID NO: 299):
TGGGAACAAGAGGGCATCTGCTAAAGTTTCAGATTCCATTTCTGCTCAGT
ATCCAGTAGTGGATCATGAATTTGATGCAGTGGTGG
PBGD (GenBank Accession No. BC019323
(SEQ ID NO: 336)),
PBGD Forward primer (SEQ ID NO: 300):
TGAGAGTGATTCGCGTGGG
PBGD Reverse primer (SEQ ID NO: 301):
CCAGGGTACGAGGCTTTCAAT
PBGD-amplicon (SEQ ID NO: 302):
TGAGAGTGATTCGCGTGGGTACCCGCAAGAGCCAGCTTGCTCGCATACAG
ACGGACAGTGTGGTGGCAACATTGAAAGCCTCGTACCCTGG
HPRT1 (GenBank Accession No. NM_000194
(SEQ ID NO: 337)),
HPRT1 Forward primer (SEQ ID NO: 303):
TGACACTGGCAAAACAATGCA
HPRT1 Reverse primer (SEQ ID NO: 304):
GGTCCTTTTCACCAGCAAGCT
HPRT1-amplicon (SEQ ID NO: 305) (SEQ ID NO: 305):
TGACACTGGCAAAACAATGCAGACTTTGCTTTCCTTGGTCAGGCAGTATA
ATCCAAAGATGGTCAAGGTCGCAAGCTTGCTGGTGAAAAGGACC

[0718] The sequences of the housekeeping genes measured in all the examples on breast cancer panel were as follows:

G6PD (GenBank Accession No. NM_000402
(SEQ ID NO:339))
G6PD Forward primer (SEQ ID NO: 309):
gaggccgtcaccaagaacat
G6PD Reverse primer (SEQ ID NO: 310):
ggacagccggtcagagctc
G6PD-amplicon (SEQ ID NO: 311):
gaggccgtcaccaagaacattcacgagtcctgcatgagccagataggctg
gaaccgcatcatcgtggagaagcccttcgggagggacctgcagagctctg
accggctgtcc
SDHA (GenBank Accession No. NM_004168
(SEQ ID NO:335))
SDHA Forward primer (SEQ ID NO: 297):
TGGGAACAAGAGGGCATCTG
SDHA Reverse primer (SEQ ID NO: 298):
CCACCACTGCATCAAATTCATG
SDHA-amplicon (SEQ ID NO:299):
TGGGAACAAGAGGGCATCTGCTAAAGTTTCAGATTCCATTTCTGCTCAGT
ATCCAGTAGTGGATCATGAATTTGATGCAGTGGTGG
PBGD (GenBank Accession No. BC019323
(SEQ ID NO:336)),
PBGD Forward primer (SEQ ID NO: 300):
TGAGAGTGATTCGCGTGGG
PBGD Reverse primer (SEQ ID NO: 301):
CCAGGGTACGAGGCTTTCAAT
PBGD-amplicon (SEQ ID NO: 302):
TGAGAGTGATTCGCGTGGGTACCCGCAAGAGCCAGCTTGCTCGCATACAG
ACGGACAGTGTGGTGGCAACATTGAAAGCCTCGTACCCTGG
HPRT1 (GenBank Accession No. NM_000194
(SEQ ID NO:337)),
HPRT1 Forward primer (SEQ ID NO: 303):
TGACACTGGCAAAACAATGCA
HPRT1 Reverse primer (SEQ ID NO: 304):
GGTCCTTTTCACCAGCAAGCT
HPRT1-amplicon (SEQ ID NO: 305) (SEQ ID NO: 305):
TGACACTGGCAAAACAATGCAGACTTTGCTTTCCTTGGTCAGGCAGTATA
ATCCAAAGATGGTCAAGGTCGCAAGCTTGCTGGTGAAAAGGACC

[0719] The sequences of the housekeeping genes measured in all the examples on normal tissue samples panel were as follows:

RPL19 (GenBank Accession No. NM_000981
(SEQ ID NO: 342))
RPL19 Forward primer (SEQ ID NO: 318):
TGGCAAGAAGAAGGTCTGGTTAG
RPL19 Reverse primer (SEQ ID NO: 319):
TGATCAGCCCATCTTTGATGAG
RPL19-amplicon (SEQ ID NO: 320):
TGGCAAGAAGAAGGTCTGGTTAGACCCCAATGAGACCAATGAAATCGCCA
ATGCCAACTCCCGTCAGCAGATCCGGAAGCTCATCAAAGATGGGCTGATC
A
TATA box (GenBank Accession No. NM_003194
(SEQ ID NO: 343)),
TATA box Forward primer (SEQ ID NO: 321):
CGGTTTGCTGCGGTAATCAT
TATA box Reverse primer (SEQ ID NO: 322):
TTTCTTGCTGCCAGTCTGGAC
TATA box amplicon (SEQ ID NO: 323):
CGGTTTGCTGCGGTAATCATGAGGATAAGAGAGCCACGAACCACGGCACT
GATTTTCAGTTCTGGGAAAATGGTGTGCACAGGAGCCAAGAGTGAAGAAC
AGTCCAGACTGGCAGCAAGAAA
Ubiquitin (GenBank Accession No. BC000449
(SEQ ID NO: 341))
Ubiquitin Forward primer (SEQ ID NO: 315):
ATTTGGGTCGCGGTTCTTG
Ubiquitin Reverse primer (SEQ ID NO: 316):
TGCCTTGACATTCTCGATGGT
Ubiquitin-amplicon (SEQ ID NO: 317)
ATTTGGGTCGCGGTTCTTGTTTGTGGATCGCTGTGATCGTCACTTGACAA
TGCAGATCTTCGTGAAGACTCTGACTGGTAAGACCATCACCCTCGAGG T
TGAGCCCAGTGACACCATCGAGAATGTCAAGGCA
SDHA (GenBank Accession No. NM_004168
(SEQ ID NO: 335))
SDHA Forward primer (SEQ ID NO: 297):
TGGGAACAAGAGGGCATCTG
SDHA Reverse primer (SEQ ID NO: 298):
CCACCACTGCATCAAATTCATG
SDHA-amplicon (SEQ ID NO: 299):
TGGGAACAAGAGGGCATCTGCTAAAGTTTCAGATTCCATTTCTGCTCAGT
ATCCAGTAGTGGATCATGAATTTGATGCAGTGGTGG

[0720] Oligonucleotide-Based Micro-Array Experiment Protocol-Microarray fabrication

[0721] Microarrays (chips) were printed by pin deposition using the MicroGrid II MGII 600 robot from BioRobotics Limited (Cambridge, UK). 50-mer oligonucleotides target sequences were designed by Compugen Ltd (Tel-Aviv, Ill.) as described by A. Shoshan et al, “Optical technologies and informatics”, Proceedings of SPIE. Vol 4266, pp. 86-95 (2001). The designed oligonucleotides were synthesized and purified by desalting with the Sigma-Genosys system (The Woodlands, Tex., US) and all of the oligonucleotides were joined to a C6 amino-modified linker at the 5′ end, or being attached directly to CodeLink slides (Cat #25-6700-01. Amersham Bioscience, Piscataway, N.J., US). The 50-mer oligonucleotides, forming the target sequences, were first suspended in Ultra-pure DDW (Cat # 01-866-1A Kibbutz Beit-Haemek, Israel) to a concentration of 50 μM. Before printing the slides, the oligonucleotides were resuspended in 300 mM sodium phosphate (pH 8.5) to final concentration of 150 mM and printed at 35-40% relative humidity at 21° C.

[0722] Each slide contained a total of 9792 features in 32 subarrays. Of these features, 4224 features were sequences of interest according to the present invention and negative controls that were printed in duplicate. An additional 288 features (96 target sequences printed in triplicate) contained housekeeping genes from Human Evaluation Library2, Compugen Ltd, israel. Another 384 features are E. coli spikes 1-6, which are oligos to E-Coli genes which are commercially available in the Array Control product (Array control—sense oligo spots, Ambion Inc. Austin, Tex. Cat #1781, Lot #112K06).

### Post-Coupling Processing of Printed Slides

[0723] After the spotting of the oligonucleotides to the glass (CodeLink) slides, the slides were incubated for 24 hours in a sealed saturated NaCl humidification chamber (relative humidity 70-75%).

[0724] Slides were treated for blocking of the residual reactive groups by incubating them in blocking solution at 50° C. for 15 minutes (10 ml/slide of buffer containing 0.1M Tris, 50 mM ethanolamine, 0.1% SDS). The slides were then rinsed twice with Ultra-pure DDW (double distilled water). The slides were then washed with wash solution (10 ml/slide. 4×SSC, 0.1% SDS)) at 50° C. for 30 minutes on the shaker. The slides were then rinsed twice with Ultra-pure DDW, followed by drying by centrifugation for 3 minutes at 800 rpm.

[0725] Next, in order to assist in automatic operation of the hybridization protocol, the slides were treated with Ventana Discovery hybridization station barcode adhesives. The printed slides were loaded on a Bio-Optica (Milan, Italy) hematology staining device and were incubated for 10 minutes in 50 ml of 3-Aminopropyl Triethoxysilane (Sigma A3648 lot #122K589). Excess fluid was dried and slides were then incubated for three hours in 20 mm/Hg in a dark vacuum desiccator (Pelco 2251, Ted Pella, Inc. Redding Calif.).

[0726] The following protocol was then followed with the Genisphere 900-RP (random primer), with mini elute columns on the Ventana Discovery HybStation™, to perform the microarray experiments. Briefly, the protocol was performed as described with regard to the instructions and information provided with the device itself. The protocol included cDNA synthesis and labeling. cDNA concentration was measured with the TBS-380 (Turner Biosystems. Sunnyvale, Calif.) PicoFlour, which is used with the OliGreen ssDNA Quantitation reagent and kit.

[0727] Hybridization was performed with the Ventana Hybridization device, according to the provided protocols (Discovery Hybridization Station Tuscon Ariz.).

[0728] The slides were then scanned with GenePix 4000B dual laser scanner from Axon Instruments Inc, and analyzed by GenePix Pro 5.0 software.

[0729] Schematic summary of the oligonucleotide based microarray fabrication and the experimental flow is presented in FIGS. 4 and 5.

[0730] Briefly, as shown in FIG. 4, DNA oligonucleotides at 25 uM were deposited (printed) onto Amersham ‘CodeLink’ glass slides generating a well defined ‘spot’. These slides are covered with a long-chain, hydrophilic polymer chemistry that creates an active 3-D surface that covalently binds the DNA oligonucleotides 5′-end via the C6-amine modification. This binding ensures that the full length of the DNA oligonucleotides is available for hybridization to the cDNA and also allows lower background, high sensitivity and reproducibility.

[0731] FIG. 5 shows a schematic method for performing the microarray experiments. It should be noted that stages on the left-hand or right-hand side may optionally be performed in any order, including in parallel, until stage 4 (hybridization). Briefly, on the left-hand side, the target oligonucleotides are being spotted on a glass microscope slide (although optionally other materials could be used) to form a spotted slide (stage 1). On the right hand side, control sample RNA and cancer sample RNA are Cy3 and Cy5 labeled, respectively (stage 2), to form labeled probes. It should be noted that the control and cancer samples come from corresponding tissues (for example, normal prostate tissue and cancerous prostate tissue). Furthermore, the tissue from which the RNA was taken is indicated below in the specific examples of data for particular clusters, with regard to overexpression of an oligonucleotide from a “chip” (microarray), as for example “prostate” for chips in which prostate cancerous tissue and normal tissue were tested as described above. In stage 3, the probes are mixed. In stage 4, hybridization is performed to form a processed slide. In stage 5, the slide is washed and scanned to form an image file, followed by data analysis in stage 6.

### ACTUAL MARKER EXAMPLES

[0732] The following examples relate to specific actual marker examples. The numbering of the tables restarts within each section.

### Description for Cluster AA383349

[0733] Cluster AA383349 features 4 transcript(s) and 25 segment(s) of interest, the names for which are given in Tables 2 and 3, respectively, the sequences themselves are given. The selected protein variants are given in table 4.

TABLE 2
Transcripts of interest
Transcript Name

AA383349_T6 (SEQ ID NO: 334)
AA383349_T7 (SEQ ID NO: 1)
AA383349_T16 (SEQ ID NO: 2)
AA383349_T17 (SEQ ID NO: 3)

TABLE 3
Segments of interest
Segment Name

AA383349_N0 (SEQ ID NO: 4)
AA383349_N1 (SEQ ID NO: 5)
AA383349_N3 (SEQ ID NO: 6)
AA383349_N5 (SEQ ID NO: 7)
AA383349_N6 (SEQ ID NO: 8)
AA383349_N32 (SEQ ID NO: 9)
AA383349_N34 (SEQ ID NO: 10)
AA383349_N2 (SEQ ID NO: 11)
AA383349_N4 (SEQ ID NO: 12)
AA383349_N9 (SEQ ID NO: 13)
AA383349_N11 (SEQ ID NO: 14)
AA383349_N12 (SEQ ID NO: 15)
AA383349_N13 (SEQ ID NO: 16)
AA383349_N14 (SEQ ID NO: 17)
AA383349_N17 (SEQ ID NO: 18)
AA383349_N18 (SEQ ID NO: 19)
AA383349_N20 (SEQ ID NO: 20)
AA383349_N23 (SEQ ID NO: 21)
AA383349_N25 (SEQ ID NO: 22)
AA383349_N27 (SEQ ID NO: 23)
AA383349_N29 (SEQ ID NO: 24)
AA383349_N30 (SEQ ID NO: 25)
AA383349_N31 (SEQ ID NO: 26)
AA383349_N33 (SEQ ID NO: 27)
AA383349_N35 (SEQ ID NO: 28)

TABLE 4
Proteins of interest

| Protein Name | Corresponding Transcript(s) |
|---|---|
| AA383349_P4 (SEQ ID NO: 33) | AA383349_T6 (SEQ ID NO: 334) |
| AA383349_P5 (SEQ ID NO: 34) | AA383349_T7 (SEQ ID NO: 1) |
| AA383349_P11 (SEQ ID NO: 35) | AA383349_T16 (SEQ ID NO: 2) |
| AA383349_P12 (SEQ ID NO: 36) | AA383349_T17 (SEQ ID NO: 3) |

[0734] These sequences are variants of the known protein Hypothetical protein (SEQ ID NO: 29) (SwissProt accession identifier Q6DKJ7_HUMAN (SEQ ID NO:429)), referred to herein as the previously known protein.

[0735] The following GO Annotation(s) apply to the previously known protein. The following annotation(s) were found: catalytic activity, which are annotation(s) related to Molecular Function.

[0736] The GO assignment relies on information from one or more of the SwissProt/TremB1 Protein knowledgebase, available from <http://www.expasy.ch/sprot/>; or Locuslink, available from <http://www.ncbi.nlm.nih.gov/projects/LocusLink/>.

[0737] Cluster AA383349 can be used as a diagnostic marker according to overexpression of transcripts of this cluster in cancer. Expression of such transcripts in normal tissues is also given according to the previously described methods. The term “number” in the left hand column of the table and the numbers on the y-axis of FIG. 6 refer to weighted expression of ESTs in each category, as “parts per million” (ratio of the expression of ESTs for a particular cluster to the expression of all ESTs in that category, according to parts per million).

[0738] Overall, the following results were obtained as shown with regard to the histograms in FIG. 6 and Table 5. This cluster is overexpressed (at least at a minimum level) in the following pathological conditions: epithelial malignant tumors.

TABLE 5
Normal tissue distribution

| Name of Tissue | Number |
|---|---|
| brain | 9 |
| ovary | 0 |
| prostate | 0 |
| general | 3 |
| uterus | 0 |
| colon | 0 |
| kidney | 0 |
| epithelial | 0 |

TABLE 6
P values and ratios for expression in cancerous tissue

| Name of Tissue | P1 | P2 | SP1 | R3 | SP2 | R4 |
|---|---|---|---|---|---|---|
| brain | 9.0e−01 | 8.9e−01 | 1.0e+00 | 0.2 | 8.4e−01 | 0.6 |
| ovary | 6.2e−01 | 4.2e−01 | 6.8e−01 | 1.5 | 5.9e−01 | 1.6 |
| prostate | 5.1e−01 | 5.8e−01 | 6.7e−01 | 1.5 | 7.5e−01 | 1.3 |
| general | 2.5e−01 | 4.4e−01 | 2.1e−01 | 1.5 | 4.4e−01 | 1.1 |
| uterus | 4.4e−01 | 6.2e−01 | 2.9e−01 | 2.0 | 5.1e−01 | 1.5 |
| colon | 3.5e−01 | 4.1e−01 | 6.9e−01 | 1.4 | 7.7e−01 | 1.3 |
| kidney | 5.7e−01 | 4.0e−01 | N/A | N/A | 7.0e−01 | 1.5 |
| epithelial | 1.9e−03 | 4.9e−03 | 2.2e−02 | 5.9 | 5.5e−02 | 4.3 |

[0739] As noted above, cluster AA383349 features 4 transcript(s), which were listed in Table 2 above. These transcript(s) encode for protein(s) which are variant(s) of protein Hypothetical protein (SEQ ID NO: 29). A description of each variant protein according to the present invention is now provided.

[0740] Variant protein AA383349_P4 (SEQ ID NO: 33) according to the present invention has an amino acid sequence as given in the “Sequence Listing” of the application; it is encoded by transcript(s) AA383349_T6 (SEQ ID NO: 334). An alignment is given to the known protein (Hypothetical protein, SEQ ID NOs:29-32, 429) in the alignment table, on the attached CDROM. One or more alignments to one or more previously published protein sequences are given in the alignment table, on the attached CDROM. A brief description of the relationship of the variant protein according to the present invention to each such aligned protein is as follows:

### 1. Comparison Report Between AA383349_P4 (SEQ ID NO: 33) and Q96EZ7_HUMAN (SEQ ID NO: 30):

[0741] A. An isolated chimeric polypeptide encoding for AA383349_P4 (SEQ ID NO: 33), comprising a amino acid sequence being at least about 90% homologous to MASRLLHRHIREQLKDLVEILQDPSPPPLCLPTTPGTPDSSDPSHLLGPQSCWSSQKEVSHESLVVGAIENAF QLMDEQMARERRGHQVEGGCCALVVIYLLGKVYVANAGDSRAIIVRNGEIIPMSREFTPETERQRLQLLG FLKPELLGSEFTHLEFPRRVLPKELGQRNLYRDQNMTGWAYKKIELEDLRFPLVCGEGKKARVMATIGVT RGLGDHSLKVCSSTLPIKPFLSCFPEVRVYDLTQYEHCPDDVLVLGTDGLWDVTTDCEVAATVDRVLSAY EPNDHSR corresponding to amino acids 151-440 of Q96EZ7_HUMAN (SEQ ID NO: 30), which also corresponds to amino acids 1-290 of AA383349_P4 (SEQ ID NO: 33).

### 2. Comparison Report Between AA383349_P4 (SEQ ID NO: 33) and NP_{—}005158 (SEQ ID NO: 31) (or Q9UF84_HUMAN (SEQ ID NO: 32)):

[0742] A. An isolated chimeric polypeptide encoding for AA383349_P4 (SEQ ID NO: 33), comprising a first amino acid sequence being at least about 90% homologous to MASRLLHRHIREQLKDL corresponding to amino acids 1-17 of NP_{—}005158 (SEQ ID NO: 31), which also corresponds to amino acids 1-17 of AA383349_P4 (SEQ ID NO: 33), a second amino acid sequence being at least about 70%, optionally at least 80%, preferably at least 85%, more preferably at least 90% and most preferably at least 95% homologous to a polypeptide having the sequence VEILQDPSPPPLCLPTTPGTPDSSDPSHLLGPQSCWSSQ (SEQ ID NO: 494) corresponding to amino acids 18-56 of AA383349_P4 (SEQ ID NO: 33), and a third amino acid sequence being at least about 90% homologous to KEVSHESLVVGAIENAFQLMDEQMARERRGHQVEGGCCALVVIYLLGKVYVANAGDSRAIIVRNGEIIPM SREFTPETERQRLQLLGFLKPELLGSEFTHLEFPRRVLPKELGQRMLYRDQNMTGWAYKKIELEDLRFPLV CGEGKKARVMATIGVTRGLGDHSLKVCSSTLPIKPFLSCFPEVRVYDLTQYEHCPDDVLVLGTDGLWDVT TDCEVAATVDRVLSAYEPNDHSR corresponding to amino acids 18-251 of NP_{—}005158 (SEQ ID NO: 31), which also corresponds to amino acids 57-290 of AA383349_P4 (SEQ ID NO: 33), wherein said first amino acid sequence, second amino acid sequence and third amino acid sequence are contiguous and in a sequential order.

[0743] B. An isolated polypeptide encoding for an edge portion of AA383349_P4 (SEQ ID NO: 33), comprising an amino acid sequence being at least about 70%, optionally at least about 80%, preferably at least about 85%, more preferably at least about 90% and most preferably at least about 95% homologous to the sequence VEILQDPSPPPLCLPTTPGTPDSSDPSHLLGPQSCWSSQ (SEQ ID NO: 494) of AA383349_P4 (SEQ ID NO: 33).

### 4. Comparison Report Between AA383349_P4 (SEQ ID NO: 33) and Q6DKJ7_HUMAN (SEQ ID NO:429):

[0744] A. An isolated chimeric polypeptide encoding for AA383349_P4 (SEQ ID NO: 33), comprising a amino acid sequence being at least about 90% homologous to MASRLLHRHIREQLKDLVEILQDPSPPPLCLPTTPGTPDSSDPSHLLGPQSCWSSQKEVSHESLVVGAIENAF QLMDEQMARERRGHQVEGGCCALVVIYLLGKVYVANAGDSRAIIVRNGEIIPMSREFTPETERQRLQLLG FLKPELLGSEFTHLEFPRRVLPKELGQRMLYRDQNMTGWAYKKIELEDLRFPLVCGEGKKARVMATIGVT RGLGDHSLKVCSSTLPIKPFLSCFPEVRVYDLTQYEHCPDDVLVLGTDGLWDVTTDCEVAATVDRVLSAY EPNDHSR corresponding to amino acids 168-457 of Q6DKJ7_HUMAN (SEQ ID NO:429), which also corresponds to amino acids 1-290 of AA383349_P4 (SEQ ID NO: 33), wherein said and first amino acid sequence are contiguous and in a sequential order.

[0745] The localization of the variant protein was determined according to results from a number of different software programs and analyses, including analyses from SignalP and other specialized programs. The variant protein is believed to be located intracellularly with regard to the cell.

[0746] Variant protein AA383349_P4 (SEQ ID NO: 33) also has the following non-silent SNPs (Single Nucleotide Polymorphisms) as listed in Table 7, (given according to their position(s) on the amino acid sequence, with the alternative amino acid(s) listed).

TABLE 7
Amino acid mutations

| SNP position(s) on amino acid | Alternative |
|---|---|
| sequence | amino acid(s) |
| 13 | Q -> * |
| 46 | L -> F |
| 75 | L -> P |
| 95 | A -> T |
| 124 | I -> T |

[0747] Variant protein AA383349_P4 (SEQ ID NO: 33) is encoded by the following transcript(s): AA383349_T6 (SEQ ID NO: 334), for which the coding portion starts at position 1582 and ends at position 2451. The transcript also has the following SNPs as listed in Table 8 (given according to their position on the nucleotide sequence, with the alternative nucleic acid listed).

TABLE 8
Nucleic acid SNPs

| | SNP position(s) on nucleotide |
|---|---|
| Polymorphism | sequence |
| G -> | 1521 |
| G -> T | 1566, 1719 |
| C -> T | 1618 |
| T -> C | 1805, 1952 |
| G -> A | 1864 |
| G -> A | 2001 |
| A -> G | 2494 |
| C -> | 2721 |
| -> A | 2778 |

[0748] Variant protein AA383349_P5 (SEQ ID NO: 34) according to the present invention has an amino acid sequence as given in the “Sequence Listing” of the application; it is encoded by transcript(s) AA383349_T7 (SEQ ID NO: 1). An alignment is given to the known protein (Hypothetical protein, SEQ ID NOs:29-32, 429) in the alignment table, on the attached CDROM. One or more alignments to one or more previously published protein sequences are given in the alignment table, on the attached CDROM. A brief description of the relationship of the variant protein according to the present invention to each such aligned protein is as follows:

### 1. Comparison Report Between AA383349_P5 (SEQ ID NO: 34) and Q6DKJ7_HUMAN (SEQ ID NO:429):

[0749] A. An isolated chimeric polypeptide encoding for AA383349_P5 (SEQ ID NO: 34), comprising a amino acid sequence being at least about 90% homologous to MLNRVRSAVAHLVSSGGAPPPRPKSPDLPNAASAPPAAAPEAPRSPPAKAGSGSATPAKAVEARASFSRPT FLQLSPGGLRRADDHAGRAVQSPPDTGRRLPWSTGYAEVINAGKSRHNEDQACCEVVYVEGRRSVTGVP REPSRGQGLCFYYWGLFDGHAGGGAAEMASRLLHRHIREQLKDLVEILQDPSPPPLCLPTTPGTPDSSDPS HLLGPQSCWSSQKEVSHESLVVGAIENAFQLMDEQMARERRGHQVEGGCCALVVIYLLGKVYVANAGD SRAIIVRNGEIIPMSREFTPETERQRLQLLGFLKPELLGSEFTHLEFPRRVLPKELGQRMLYRDQNMTGWAY KKIELEDLRFPLVCGEGKKARVMATIGVTRGLGDHSLKVCSSTLPIKPFLSCFPEVRVYDLTQYEHCPDDV LVLGTDGLWDVTTDCEVAATVDRVLSAYEPNDHSR corresponding to amino acids 1-457 of Q6DKJ7_HUMAN (SEQ ID NO:429), which also corresponds to amino acids 1-457 of AA383349_P5 (SEQ ID NO: 34).

### 2. Comparison Report Between AA383349_P5 (SEQ ID NO: 34) and Q96EZ7_HUMAN (SEQ ID NO: 30):

[0750] A. An isolated chimeric polypeptide encoding for AA383349_P5 (SEQ ID NO: 34), comprising a first amino acid sequence being at least about 70%, optionally at least 80%, preferably at least 85%, more preferably at least 90% and most preferably at least 95%, homologous to a polypeptide having the sequence MLNRVRSAVAHLVSSGG (SEQ ID NO: 495) corresponding to amino acids 1-17 of AA383349_P5 (SEQ ID NO: 34), and a second amino acid sequence being at least about 90% homologous to APPPRPKSPDLPNAASAPPAAAPEAPRSPPAKAGSGSATPAKAVEARASFSRPTFLQLSPGGLRRADDHAG RAVQSPPDTGRRLPWSTGYAEVINAGKSRHNEDQACCEVVYVEGRRSVTGVPREPSRGQGLCFYYWGLF DGHAGGGAAEMASRLLHRHIREQLKDLVEILQDPSPPPLCLPTTPGTPDSSDPSHLLGPQSCWSSQKEVSHE SLVVGAIENAFQLMDEQMARERRGHQVEGGCCALVVIYLLGKVYVANAGDSRAIIVRNGEIIPMSREFTPE TERQRLQLLGFLKPELLGSEFTHLEFPRRVLPKELGQRMLYRDQNMTGWAYKKIELEDLRFPLVCGEGKK ARVMATIGVTRGLGDHSLKVCSSTLPIKPFLSCFPEVRVYDLTQYEHCPDDVLVLGTDGLWDVTTDCEVA ATVDRVLSAYEPNDHSR corresponding to amino acids 1-440 of Q96EZ7_HUMAN (SEQ ID NO: 30), which also corresponds to amino acids 18-457 of AA383349_P5 (SEQ ID NO: 34), wherein said first amino acid sequence and second amino acid sequence are contiguous and in a sequential order.

[0751] B. An isolated polypeptide encoding for a head of AA383349_P5 (SEQ ID NO: 34), comprising a polypeptide being at least 70%, optionally at least about 80%, preferably at least about 85%, more preferably at least about 90% and most preferably at least about 95% homologous to the sequence MLNRVRSAVAHLVSSGG (SEQ ID NO: 495) of AA383349_P5 (SEQ ID NO: 34).

### 3. Comparison Report Between AA383349_P5 (SEQ ID NO: 34) and NP 005158 (SEQ ID NO: 31) (or Q9UF84_HUMAN (SEQ ID NO: 32)):

[0752] A. An isolated chimeric polypeptide encoding for AA383349_P5 (SEQ ID NO: 34), comprising a first amino acid sequence being at least about 70%, optionally at least 80%, preferably at least 85%, more preferably at least 90% and most preferably at least 95%, homologous to a polypeptide having the sequence MLNRVRSAVAHLVSSGGAPPPRPKSPDLPNAASAPPAAAPEAPRSPPAKAGSGSAJPAKAVEARASFSRPT FLQLSPGGLRRADDHAGRAVQSPPDTGRRLPWSTGYAEVINAGKSRHNEDQACCEVVYVEGRRSVTGVP REPSRGQGLCFYYWGLFDGHAGGGAAE (SEQ ID NO: 496) corresponding to amino acids 1-167 of AA383349_P5 (SEQ ID NO: 34), a second amino acid sequence being at least about 90% homologous to MASRLLHRHIREQLKDL corresponding to amino acids 1-17 of NP_{—}005158 (SEQ ID NO: 31), which also corresponds to amino acids 168-184 of AA383349_P5 (SEQ ID NO: 34), a third amino acid sequence being at least about 70%, optionally at least 80%, preferably at least 85%, more preferably at least 90% and most preferably at least 95% homologous to a polypeptide having the sequence VEILQDPSPPPLCLPTTPGTPDSSDPSHLLGPQSCWSSQ (SEQ ID NO: 494) corresponding to amino acids 185-223 of AA383349_P5 (SEQ ID NO: 34), and a fourth amino acid sequence being at least about 90% homologous to KEVSHESLVVGAIENAFQLMDEQMARERRGHQVEGGCCALVVIYLLGKVYVANAGDSRAIIVRNGEIIPM SREFTPETERQRLQLLGFLKPELLGSEFTHLEFPRRVLPKELGQRMLYRDQNMTGWAYKKIELEDLRFPLV CGEGKKARVMATIGVTRGLGDHSLKVCSSTLPIKPFLSCFPEVRVYDLTQYEHCPDDVLVLGTDGLWDVT TDCEVAATVDRVLSAYEPNDHSR corresponding to amino acids 18-251 of NP_{—}005158 (SEQ ID NO: 31), which also corresponds to amino acids 224-457 of AA383349_P5 (SEQ ID NO: 34), wherein said first amino acid sequence, second amino acid sequence, third amino acid sequence and fourth amino acid sequence are contiguous and in a sequential order.

[0753] B. An isolated polypeptide encoding for a head of AA383349_P5 (SEQ ID NO: 34), comprising a polypeptide being at least 70%, optionally at least about 80%, preferably at least about 85%, more preferably at least about 90% and most preferably at least about 95% homologous to the sequence

(SEQ ID NO: 496)

MLNRVRSAVAHLVSSGGAPPPRPKSPDLPNAASAPPAAAPEAPRSPPAKA
GSGSATPAKAVEARASFSRPTFLQLSPGGLRRADDHAGRAVQSPPDTGRR
LPWSTGYAEVINAGKSRHNEDQACCEVVYVEGRRSVTGVPREPSRGQGLC
FYYWGLFDGHAGGGAAE
of

(SEQ ID NO: 34)

AA383349_P5.

[0754] C. An isolated polypeptide encoding for an edge portion of AA383349_P5 (SEQ ID NO: 34), comprising an amino acid sequence being at least about 70%, optionally at least about 80%, preferably at least about 85%, more preferably at least about 90% and most preferably at least about 95% homologous to the sequence

(SEQ ID NO: 494)

VEILQDPSPPPLCLPTTPGTPDSSDPSHLLGPQSCWSSQ
of

(SEQ ID NO: 34)

AA383349_P5.

[0755] The localization of the variant protein was determined according to results from a number of different software programs and analyses, including analyses from SignalP and other specialized programs. The variant protein is believed to be located intracellularly with regard to the cell.

[0756] Variant protein AA383349_P5 (SEQ ID NO: 34) also has the following non-silent SNPs (Single Nucleotide Polymorphisms) as listed in Table 9, (given according to their position(s) on the amino acid sequence, with the alternative amino acid(s) listed).

TABLE 9
Amino acid mutations

| SNP position(s) on amino acid | Alternative |
|---|---|
| sequence | amino acid(s) |
| 147 | Q -> |
| 180 | Q -> * |
| 213 | L -> F |
| 242 | L -> P |
| 262 | A -> T |
| 291 | I -> T |

[0757] Variant protein AA383349_P5 (SEQ ID NO: 34) is encoded by the following transcript(s): AA383349_T7 (SEQ ID NO: 1), for which the coding portion starts at position 163 and ends at position 1533. The transcript also has the following SNPs as listed in Table 10 (given according to their position on the nucleotide sequence, with the alternative nucleic acid listed).

TABLE 10
Nucleic acid SNPs

| | SNP position(s) on nucleotide |
|---|---|
| Polymorphism | sequence |
| G -> | 603 |
| G -> T | 648, 801 |
| C -> T | 700 |
| T -> C | 887, 1034 |
| G -> A | 946, 1083 |
| A -> G | 1576 |
| C -> | 1803 |
| -> A | 1860 |

[0758] Variant protein AA383349_P11 (SEQ ID NO: 35) according to the present invention has an amino acid sequence as given in the “Sequence Listing” of the application; it is encoded by transcript(s) AA383349 T16 (SEQ ID NO: 2).

[0759] The localization of the variant protein was determined according to results from a number of different software programs and analyses, including analyses from SignalP and other specialized programs. The variant protein is believed to be located intracellularly with regard to the cell.

[0760] Variant protein AA383349_P11 (SEQ ID NO: 35) also has the following non-silent SNPs (Single Nucleotide Polymorphisms) as listed in Table 11, (given according to their position(s) on the amino acid sequence, with the alternative amino acid(s) listed).

TABLE 11
Amino acid mutations

| SNP position(s) on amino acid | |
|---|---|
| sequence | Alternative amino acid(s) |
| 13 | Q -> * |
| 46 | L -> F |
| 75 | L -> P |
| 95 | A -> T |
| 124 | I -> T |

[0761] Variant protein AA383349_P11 (SEQ ID NO: 35) is encoded by the following transcript(s): AA383349_T16 (SEQ ID NO: 2), for which the coding portion starts at position 1582 and ends at position 2133. The transcript also has the following SNPs as listed in Table 12 (given according to their position on the nucleotide sequence, with the alternative nucleic acid listed).

TABLE 12
Nucleic acid SNPs

| | SNP position(s) on nucleotide |
|---|---|
| Polymorphism | sequence |
| G -> | 1521 |
| G -> T | 1566, 1719 |
| C -> T | 1618 |
| T -> C | 1805, 1952 |
| G -> A | 1864, 2001 |
| A -> G | 2430 |
| C -> | 2657 |
| -> A | 2714 |

[0762] Variant protein AA383349_P12 (SEQ ID NO: 36) according to the present invention has an amino acid sequence as given in the “Sequence Listing” of the application; it is encoded by transcript(s) AA383349_T17 (SEQ ID NO: 3). An alignment is given to the known protein (Hypothetical protein, SEQ ID NOs: 29-32, 429) in the alignment table, on the attached CDROM. One or more alignments to one or more previously published protein sequences are given in the alignment table, on the attached CDROM. A brief description of the relationship of the variant protein according to the present invention to each such aligned protein is as follows:

### 1. Comparison Report Between AA383349_P12 (SEQ ID NO: 36) and Q6DKJ7_HUMAN (SEQ ID NO:429):

[0763] A. An isolated chimeric polypeptide encoding for AA383349_P12 (SEQ ID NO: 36), comprising a first amino acid sequence being at least about 90% homologous to MLNRVRSAVAHLVSSGGAPPPRPKSPDLPNAASAPPAAAPEAPRSPPAKAGSGSATPAKAVEARASFSRPT FLQLSPGGLRRADDHAGRAVQSPPDTGRRLPWSTGYAEVINAGKSRHNEDQACCEVVYVEGRRSVTGVP REPSRGQGLCFYYWGLFDGHAGGGAAEMASRLLHRHIREQLKDLVEILQDPSPPPLCLPTTPGTPDSSDPS HLLGPQSCWSSQKEVSBESLVVGAIENAFQLMDEQMARERRGHQVEGGCCALVVIYLLGKVYVANAGD SRAIIVRNGEIIPMSREFTPETERQRLQLLGFLKPELLGSEFTHLEFPRRVLPKELGQRMLYRDQNMTGW corresponding to amino acids 1-349 of Q6DKJ7_HUMAN (SEQ ID NO:429), which also corresponds to amino acids 1-349 of AA383349_P12 (SEQ ID NO: 36), and a second amino acid sequence LG corresponding to amino acids 350-351 of AA383349_P12 (SEQ ID NO: 36), wherein said first amino acid sequence and second amino acid sequence are contiguous and in a sequential order.

### 2. Comparison Report Between AA383349_P12 (SEQ ID NO: 36) and Q96EZ7_HUMAN (SEQ ID NO: 30):

[0764] A. An isolated chimeric polypeptide encoding for AA383349_P12 (SEQ ID NO: 36), comprising a first amino acid sequence being at least about 70%, optionally at least 80%, preferably at least 85%, more preferably at least 90% and most preferably at least 95%, homologous to a polypeptide having the sequence MLNRVRSAVAHLVSSGG (SEQ ID NO: 495) corresponding to amino acids 1-17 of AA383349_P12 (SEQ ID NO: 36), a second amino acid sequence being at least about 90% homologous to APPPRPKSPDLPNAASAPPAAAPEAPRSPPAKAGSGSATPAKAVEARASFSRPTFLQLSPGGLRRADDHAG RAVQSPPDTGRRLPWSTGYAEVINAGKSRHNEDQACCEVVYVEGRRSVTGVPREPSRGQGLCFYYWGLF DGHAGGGAAEMASRLLHRHIREQLKDLVEILQDPSPPPLCLPTTPGTPDSSDPSHLLGPQSCWSSQKEVSHE SLVVGAIENAFQLMDEQMARERRGHQVEGGCCALVVIYLLGKVYVANAGDSRAIIVRNGEIIPMSREFTPE TERQRLQLLGFLKPELLGSEFTHLEFPRRVLPKELGQRMLYRDQNMTGW corresponding to amino acids 1-332 of Q96EZ7_HUMAN (SEQ ID NO: 30), which also corresponds to amino acids 18-349 of AA383349_P12 (SEQ ID NO: 36), and a third amino acid sequence LG corresponding to amino acids 350-351 of AA383349_P12 (SEQ ID NO: 36), wherein said first amino acid sequence, second amino acid sequence and third amino acid sequence are contiguous and in a sequential order.

[0765] B. An isolated polypeptide encoding for a head of AA383349_P12 (SEQ ID NO: 36), comprising a polypeptide being at least 70%, optionally at least about 80%, preferably at least about 85%, more preferably at least about 90% and most preferably at least about 95% homologous to the sequence MLNRVRSAVAHLVSSGG (SEQ ID NO: 495) of AA383349_P12 (SEQ ID NO: 36).

[0766] The localization of the variant protein was determined according to results from a number of different software programs and analyses, including analyses from SignalP and other specialized programs. The variant protein is believed to be located intracellularly with regard to the cell.

[0767] Variant protein AA383349_P12 (SEQ ID NO: 36) also has the following non-silent SNPs (Single Nucleotide Polymorphisms) as listed in Table 13, (given according to their position(s) on the amino acid sequence, with the alternative amino acid(s) listed).

TABLE 13
Amino acid mutations

| SNP position(s) on amino acid | Alternative |
|---|---|
| sequence | amino acid(s) |
| 147 | Q -> |
| 180 | Q -> * |
| 213 | L -> F |
| 242 | L -> P |
| 262 | A -> T |
| 291 | I -> T |

[0768] Variant protein AA383349_P12 (SEQ ID NO: 36) is encoded by the following transcript(s): AA383349_T17 (SEQ ID NO: 3), for which the coding portion starts at position 163 and ends at position 1215. The transcript also has the following SNPs as listed in Table 14 (given according to their position on the nucleotide sequence, with the alternative nucleic acid listed).

TABLE 14
Nucleic acid SNPs

| | SNP position(s) on |
|---|---|
| Polymorphism | nucleotide sequence |
| G -> | 603 |
| G -> T | 648, 801 |
| C -> T | 700 |
| T -> C | 887, 1034 |
| G -> A | 946, 1083 |
| A -> G | 1512 |
| C -> | 1739 |
| -> A | 1796 |

[0769] As noted above, cluster AA383349 features 25 segment(s), which were listed in Table 3 above and for which the sequence(s) are given in the “Sequence Listing” of the application. These segment(s) are portions of nucleic acid sequence(s) which are described herein separately because they are of particular interest. A description of some of these segments according to the present invention is now provided.

[0770] Segment cluster AA383349_N32 (SEQ ID NO: 9) according to the present invention is supported by 7 libraries. The number of libraries was determined as previously described. This segment can be found in the following transcript(s): AA383349_T16 (SEQ ID NO: 2), AA383349_T17 (SEQ ID NO: 3), AA383349_T6 (SEQ ID NO: 334) and AA383349_T7 (SEQ ID NO: 1). Table 15 below describes the starting and ending position of this segment on each transcript.

TABLE 15
Segment location on transcripts

| | Segment | Segment |
|---|---|---|
| Transcript name | starting position | ending position |
| AA383349_T16 (SEQ ID NO: 2) | 2387 | 2528 |
| AA383349_T17 (SEQ ID NO: 3) | 1469 | 1610 |
| AA383349_T6 (SEQ ID NO: 334) | 2451 | 2592 |
| AA383349_T7 (SEQ ID NO: 1) | 1533 | 1674 |

[0771] Segment cluster AA383349_N34 (SEQ ID NO: 10) according to the present invention is supported by 52 libraries. The number of libraries was determined as previously described. This segment can be found in the following transcript(s): AA383349_T16 (SEQ ID NO: 2), AA383349_T17 (SEQ ID NO: 3), AA383349_T6 (SEQ ID NO: 334) and AA383349_T7 (SEQ ID NO: 1). Table 16 below describes the starting and ending position of this segment on each transcript.

TABLE 16
Segment location on transcripts

| | Segment | Segment |
|---|---|---|
| Transcript name | starting position | ending position |
| AA383349_T16 (SEQ ID NO: 2) | 2536 | 2773 |
| AA383349_T17 (SEQ ID NO: 3) | 1618 | 1855 |
| AA383349_T6 (SEQ ID NO: 334) | 2600 | 2837 |
| AA383349_T7 (SEQ ID NO: 1) | 1682 | 1919 |

[0772] According to an optional embodiment of the present invention, short segments related to the above cluster are also provided. These segments are up to about 120 bp in length, and so are included in a separate description.

[0773] Segment cluster AA383349_N23 (SEQ ID NO: 21) according to the present invention is supported by 56 libraries. The number of libraries was determined as previously described. This segment can be found in the following transcript(s): AA383349_T16 (SEQ ID NO: 2), AA383349_T17 (SEQ ID NO: 3), AA383349_T6 (SEQ ID NO: 334) and AA383349_T7 (SEQ ID NO: 1). Table 17 below describes the starting and ending position of this segment on each transcript.

TABLE 17
Segment location on transcripts

| | Segment | Segment |
|---|---|---|
| Transcript name | starting position | ending position |
| AA383349_T16 (SEQ ID NO: 2) | 2008 | 2126 |
| AA383349_T17 (SEQ ID NO: 3) | 1090 | 1208 |
| AA383349_T6 (SEQ ID NO: 334) | 2008 | 2126 |
| AA383349_T7 (SEQ ID NO: 1) | 1090 | 1208 |

[0774] Segment cluster AA383349_N27 (SEQ ID NO: 23) according to the present invention is supported by 53 libraries. The number of libraries was determined as previously described. This segment can be found in the following transcript(s): AA383349_T16 (SEQ ID NO: 2), AA383349_T17 (SEQ ID NO: 3), AA383349_T6 (SEQ ID NO: 334) and AA383349_T7 (SEQ ID NO: 1). Table 18 below describes the starting and ending position of this segment on each transcript.

TABLE 18
Segment location on transcripts

| | Segment | Segment |
|---|---|---|
| Transcript name | starting position | ending position |
| AA383349_T16 (SEQ ID NO: 2) | 2127 | 2234 |
| AA383349_T17 (SEQ ID NO: 3) | 1209 | 1316 |
| AA383349_T6 (SEQ ID NO: 334) | 2191 | 2298 |
| AA383349_T7 (SEQ ID NO: 1) | 1273 | 1380 |

[0775] Segment cluster AA383349_N29 (SEQ ID NO: 24) according to the present invention is supported by 49 libraries. The number of libraries was determined as previously described. This segment can be found in the following transcript(s): AA383349_T16 (SEQ ID NO: 2), AA383349_T17 (SEQ ID NO: 3), AA383349_T6 (SEQ ID NO: 334) and AA383349_T7 (SEQ ID NO: 1). Table 19 below describes the starting and ending position of this segment on each transcript.

TABLE 19
Segment location on transcripts

| | Segment | Segment |
|---|---|---|
| Transcript name | starting position | ending position |
| AA383349_T16 (SEQ ID NO: 2) | 2235 | 2249 |
| AA383349_T17 (SEQ ID NO: 3) | 1317 | 1331 |
| AA383349_T6 (SEQ ID NO: 334) | 2299 | 2313 |
| AA383349_T7 (SEQ ID NO: 1) | 1381 | 1395 |

[0776] Segment cluster AA383349 N30 (SEQ ID NO: 25) according to the present invention is supported by 53 libraries. The number of libraries was determined as previously described. This segment can be found in the following transcript(s): AA383349_T16 (SEQ ID NO: 2), AA383349_T17 (SEQ ID NO: 3), AA383349_T6 (SEQ ID NO: 334) and AA383349_T7 (SEQ ID NO: 1). Table 20 below describes the starting and ending position of this segment on each transcript.

TABLE 20
Segment location on transcripts

| | Segment | Segment |
|---|---|---|
| Transcript name | starting position | ending position |
| AA383349_T16 (SEQ ID NO: 2) | 2250 | 2330 |
| AA383349_T17 (SEQ ID NO: 3) | 1332 | 1412 |
| AA383349_T6 (SEQ ID NO: 334) | 2314 | 2394 |
| AA383349_T7 (SEQ ID NO: 1) | 1396 | 1476 |

[0777] Microarray (chip) data is available for segments AA383349_N27 (SEQ ID NO: 23), AA383349_N29 (SEQ ID NO: 24) and AA383349_N30 (SEQ ID NO: 25), as follows. As described above with regard to the cluster itself, various oligonucleotides were tested for being differentially expressed in various disease conditions, particularly cancer. The following oligonucleotides were found to hit this segment, shown in Table 21.

TABLE 21
Oligonucleotides related to this segment

| | | Chip |
|---|---|---|
| Oligonucleotide name | Overexpressed in cancers | reference |
| AA383349_0_8_0 (SEQ ID NO: | breast malignant tumors | BRS |
| 528) | | |

[0778] Expression of Homo sapiens protein phosphatase 2a, catalytic subunit, zeta isoform (PPP2CZ) transcripts detectable by or according to seg34WT-AA383349_seg34WT (SEQ ID NO: 358) amplicon and primers AA383349_seg34WTF (SEQ ID NO: 356) and AA383349_seg34WTR (SEQ ID NO: 357) or of PPP2CZ transcripts detectable by or according to seg32—AA383349_seg32 (SEQ ID NO: 361) amplicon and primers AA383349_seg32F (SEQ ID NO: 359) and AA383349_seg32R (SEQ ID NO: 360) was measured by real time PCR.

[0779] The sequences of corresponding primers and amplicons are given below.

Forward Primer AA383349_seg34WTF (SEQ ID NO: 356):
TCTCCCCAACAACAAGCTGG
Reverse Primer AA383349_seg34WTR (SEQ ID NO: 357):
GAGAGGCTAGTGGGAGGGATG
Amplicon AA383349_seg34WT (SEQ ID NO: 358):
TCTCCCCAACAACAAGCTGGGTTCCGGGGATGACATCTCTGTCTTCGTCA
TCCCCCTGGGAGGGCCAGGCAGTTACTCCTGAGGGGCTGAACACCATCCC
TCCCACTAGCCTCTC
Forward Primer AA383349_seg32F (SEQ ID NO: 359):
AGGGGCTGCATGGCATG
Reverse Primer AA383349_seg32R (SEQ ID NO: 360):
TATGTGGGAAGACAGATACACAGGC
Amplicon AA383349_seg32 (SEQ ID NO: 361):
AGGGGCTGCATGGCATGGTGGTAAGGGGATGGCATTGGTGAAAGAAGGGT
CAAAGGGAAGCAATGCTTGGGACCCCACATGTGGGCCTGTGTATCTGTCT
TCCCACATAC

Expression of Homo sapiens Protein Phosphatase 2a, Catalytic Subunit, Zeta Isoform (PPP2CZ) AA383349 Transcripts which are Detectable by Amplicon as Depicted in Sequence Name AA383349_Seg34WT (SEQ ID NO: 358) in Normal and Cancerous Breast Tissues

[0780] Expression of Homo sapiens protein phosphatase 2a, catalytic subunit, zeta isoform (PPP2CZ) transcripts detectable by or according to seg34WT-AA383349_seg34WT (SEQ ID NO: 358) amplicon and primers AA383349_seg34WTF (SEQ ID NO: 356) and AA383349_seg34WTR (SEQ ID NO: 357) was measured by real time PCR. In parallel the expression of four housekeeping genes—G6PD (GenBank Accession No. NM_{—}000402 (SEQ ID NO:339); G6PD amplicon (SEQ ID NO: 311)), HPRT1 (GenBank Accession No. NM_{—}000194 (SEQ ID NO:337); amplicon—HPRT1-amplicon (SEQ ID NO: 305) (SEQ ID NO: 305)), PBGD (GenBank Accession No. BC019323 (SEQ ID NO:336); amplicon—PBGD-amplicon (SEQ ID NO: 302)) and SDHA (GenBank Accession No. NM_{—}004168 (SEQ ID NO:335); amplicon—SDHA-amplicon (SEQ ID NO:299)) was measured similarly. For each RT sample, the expression of the above amplicon was normalized to the geometric mean of the quantities of the housekeeping genes. The normalized quantity of each RT sample was then divided by the median of the quantities of the normal post-mortem (PM) samples (sample numbers 57, 59, 60, 63, 66, 64, 56, 65, 67 and 58, Table 1_{—}3 above), to obtain a value of fold up-regulation for each sample relative to the median of the normal PM samples.

[0781] FIG. 7A is a histogram showing over expression of the Homo sapiens protein phosphatase 2a, catalytic subunit, zeta isoform (PPP2CZ) transcripts for transcripts detectable by or according to seg34WT-AA383349 (SEQ ID NO: 358) in cancerous Breast samples relative to the normal samples.

[0782] As is evident from FIG. 7A, the expression of Homo sapiens protein phosphatase 2a, catalytic subunit, zeta isoform (PPP2CZ) transcripts detectable by the above amplicon in cancer samples was significantly higher than in the non-cancerous samples (sample numbers 57, 59, 60, 63, 66, 64, 56, 65, 67 and 58, Table 1_{—}3 above). Notably an over-expression of at least 5 fold was found in 22 out of 28 adenocarcinoma samples.

[0783] Statistical analysis was applied to verify the significance of these results, as described below.

[0784] The P value for the difference in the expression levels of Homo sapiens protein phosphatase 2a, catalytic subunit, zeta isoform (PPP2CZ) transcripts detectable by the above amplicon in Breast cancer samples versus the normal tissue samples was determined by T test as 1.52e-06.

[0785] Threshold of 5 fold over expression was found to differentiate between cancer and normal samples with P value of 1.69e-05 as checked by exact Fisher test.

[0786] The above values demonstrate statistical significance of the results.

[0787] Primer pairs are also optionally and preferably encompassed within the present invention; for example, for the above experiment, the following primer pair was used as a non-limiting illustrative example only of a suitable primer pair: AA383349_seg34WTF (SEQ ID NO: 356) forward primer; and AA383349_seg34WTR (SEQ ID NO: 357) reverse primer.

[0788] The present invention also preferably encompasses any amplicon obtained through the use of any suitable primer pair; for example, for the above experiment, the following amplicon was obtained as a non-limiting illustrative example only of a suitable amplicon: AA383349_seg34WT (SEQ ID NO: 358).

[0789] Expression of Homo sapiens protein phosphatase 2a, catalytic subunit, zeta isoform (PPP2CZ) transcripts detectable by or according to seg34WT-AA383349_seg34WT (SEQ ID NO: 358) amplicon and primers AA383349_seg34WTF (SEQ ID NO: 356) and AA383349_seg34WTR (SEQ ID NO: 357) was further measured by real time PCR using enlarged panel as shown in Table 1_{—}7. In parallel the expression of four housekeeping genes—G6PD (GenBank Accession No. NM_{—}000402 (SEQ ID NO:339); G6PD amplicon (SEQ ID NO: 311)), RPL19 (GenBank Accession No. NM_{—}000981 (SEQ ID NO:342); RPL19 amplicon (SEQ ID NO: 320)), PBGD (GenBank Accession No. BC019323 (SEQ ID NO:336); amplicon—PBGD-amplicon (SEQ ID NO: 302)) and SDHA (GenBank Accession No. NM_{—}004168 (SEQ ID NO:335); amplicon—SDHA-amplicon (SEQ ID NO:299)) was measured similarly. For each RT sample, the expression of the above amplicon was normalized to the normalization factor calculated from the expression of these house keeping genes as described in normalization method 2 in the “materials and methods” section. The normalized quantity of each RT sample was then divided by the median of the quantities of the normal samples (sample numbers 43, 45, 46, 47, 48, 49, 50, 51, 52, 54, 56, 58, 59, 60, 61, 62, 63, 64, 65, 66, 67, 68 and 69, Table 1_{—}7 above), to obtain a value of fold up-regulation for each sample relative to the median of the normal samples.

[0790] FIG. 7B is a histogram showing over expression of the above-indicated Homo sapiens protein phosphatase 2a, catalytic subunit, zeta isoform (PPP2CZ) transcripts in cancerous Breast samples relative to the normal samples.

[0791] As is evident from FIG. 7B, the expression of Homo sapiens protein phosphatase 2a, catalytic subunit, zeta isoform (PPP2CZ) transcripts detectable by the above amplicon in cancer samples was significantly higher than in the non-cancerous samples (sample numbers 43, 45, 46, 47, 48, 49, 50, 51, 52, 54, 56, 58, 59, 60, 61, 62, 63, 64, 65, 66, 67, 68 and 69, Table 1_{—}7 above). Notably an over-expression of at least 5 fold was found in 33 out of 53 adenocarcinoma samples.

[0792] Statistical analysis was applied to verify the significance of these results, as described below.

[0793] The P value for the difference in the expression levels of Homo sapiens protein phosphatase 2a, catalytic subunit, zeta isoform (PPP2CZ) transcripts detectable by the above amplicon in Breast cancer samples versus the normal tissue samples was determined by T test as 1.63e-002.

[0794] Threshold of 5 fold over expression was found to differentiate between cancer and normal samples with P value of 6.25e-005 as checked by exact Fisher test.

[0795] The above values demonstrate statistical significance of the results.

[0796] Primer pairs are also optionally and preferably encompassed within the present invention; for example, for the above experiment, the following primer pair was used as a non-limiting illustrative example only of a suitable primer pair: AA383349_seg34WTF (SEQ ID NO: 356) forward primer; and AA383349_seg34WTR (SEQ ID NO: 357) reverse primer.

[0797] The present invention also preferably encompasses any amplicon obtained through the use of any suitable primer pair; for example, for the above experiment, the following amplicon was obtained as a non-limiting illustrative example only of a suitable amplicon: AA383349_seg34WT (SEQ ID NO: 358).

Expression of Homo sapiens Protein Phosphatase 2a, Catalytic Subunit, Zeta Isoform (PPP2CZ) AA383349 Transcripts which are Detectable by Amplicon as Depicted in Sequence Name AA383349_seg34WT (SEQ ID NO: 358) in Different Normal Tissues

[0798] Expression of Homo sapiens protein phosphatase 2a, catalytic subunit, zeta isoform (PPP2CZ) transcripts detectable by or according to seg34WT-AA383349_seg34WT (SEQ ID NO: 358) amplicon and primers AA383349_seg34WTF (SEQ ID NO: 356) and AA383349_seg34WTR (SEQ ID NO: 357) was measured by real time PCR. In parallel the expression of four housekeeping genes—SDHA (GenBank Accession No. NM_{—}004168 (SEQ ID NO:335); amplicon—SDHA-amplicon (SEQ ID NO:299)), Ubiquitin (GenBank Accession No. BC000449 (SEQ ID NO:341); amplicon-Ubiquitin-amplicon (SEQ ID NO: 317)), RPL19 (GenBank Accession No. NM_{—}000981 (SEQ ID NO:342); RPL19 amplicon (SEQ ID NO: 320)) and TATA box (GenBank Accession No. NM_{—}003194 (SEQ ID NO:343); TATA amplicon (SEQ ID NO: 323)) was measured similarly. For each RT sample, the expression of the above amplicon was normalized to the geometric mean of the quantities of the housekeeping genes. The normalized quantity of each RT sample was then divided by the median of the quantities of the breast samples (sample numbers 33, 34 and 35, Table 1_{—}9 above), to obtain a value of relative expression of each sample relative to the median of the breast samples. FIG. 8A shows the results of real time PCR measurement of expression of transcripts detectable by or according to AA383349_seg34WT (SEQ ID NO: 358).

[0799] Expression of Homo sapiens protein phosphatase 2a, catalytic subunit, zeta isoform (PPP2CZ) transcripts detectable by or according to seg34WT-AA383349_seg34WT (SEQ ID NO: 358) amplicon and primers AA383349_seg34WTF (SEQ ID NO: 356) and AA383349_seg34WTR (SEQ ID NO: 357) was further measured by real time PCR using updated panel as shown in Table 1_{—}10. In parallel the expression of three housekeeping genes—SDHA (GenBank Accession No. NM_{—}004168 (SEQ ID NO:335); amplicon—SDHA-amplicon (SEQ ID NO:299)), Ubiquitin (GenBank Accession No. BC000449 (SEQ ID NO:341); amplicon—Ubiquitin-amplicon (SEQ ID NO: 317)) and TATA box (GenBank Accession No. NM_{—}003194 (SEQ ID NO:343); TATA amplicon (SEQ ID NO: 323)) was measured similarly. For each RT sample, the expression of the above amplicon was normalized to the normalization factor calculated from the expression of these house keeping genes as described in normalization method 2 in the “materials and methods” section. The normalized quantity of each RT sample was then divided by the median of the quantities of the breast samples (sample numbers 41, 42 and 43, Table 1_{—}10 above), to obtain a value of relative expression of each sample relative to the median of the breast samples. FIG. 8B shows the results of real time PCR measurement of expression of transcripts detectable by or according to AA383349_seg34WT (SEQ ID NO: 358).

Expression of Protein Phosphatase 2a AA383349 Transcripts which are Detectable by Amplicon as Depicted in Sequence Name AA383349_seg32 (SEQ ID NO: 361) in Normal and Cancerous Breast Tissues.

[0800] Expression of protein phosphatase 2a transcripts detectable by or according to seg32—AA383349_seg32 (SEQ ID NO: 361) amplicon and primers AA383349_seg32F (SEQ ID NO: 359) and AA383349_seg32R (SEQ ID NO: 360) was measured by real time PCR. In parallel the expression of four housekeeping genes-G6PD (GenBank Accession No. NM_{—}000402 (SEQ ID NO:339); G6PD amplicon (SEQ ID NO: 311)), HPRT1 (GenBank Accession No. NM_{—}000194 (SEQ ID NO:337); amplicon—HPRT1-amplicon (SEQ ID NO: 305) (SEQ ID NO: 305)), PBGD (GenBank Accession No. BC019323 (SEQ ID NO:336); amplicon—PBGD-amplicon (SEQ ID NO: 302) and SDHA (GenBank Accession No. NM_{—}004168 (SEQ ID NO:335); amplicon—SDHA-amplicon (SEQ ID NO:299) was measured similarly. For each RT sample, the expression of the above amplicon was normalized to the geometric mean of the quantities of the housekeeping genes. The normalized quantity of each RT sample was then divided by the median of the quantities of the normal post-mortem (PM) samples (sample numbers 57, 59, 60, 63, 66, 64, 56, 65, 67 and 58, Table 1_{—}3 above: “Tissue samples in breast cancer testing panel”), to obtain a value of fold up-regulation for each sample relative to the median of the normal PM samples.

[0801] FIG. 9A is a histogram showing over expression of the protein phosphatase 2a transcripts in cancerous Breast samples relative to the normal samples.

[0802] As is evident from FIG. 9A, the expression of protein phosphatase 2a transcripts detectable by the above amplicon in cancer samples was significantly higher than in the non-cancerous samples (sample numbers 57, 59, 60, 63, 66, 64, 56, 65, 67 and 58, Table 1_{—}3 above, “Tissue samples in breast cancer testing panel”). Notably an over-expression of at least 5 fold was found in 16 out of 28 adenocarcinoma samples.

[0803] Statistical analysis was applied to verify the significance of these results, as described below.

[0804] The P value for the difference in the expression levels of protein phosphatase 2a transcripts detectable by the above amplicon in Breast cancer samples versus the normal tissue samples was determined by T test as 1.56e-005.

[0805] Threshold of 5 fold over expression was found to differentiate between cancer and normal samples with P value of 1.37e-003 as checked by exact Fisher test.

[0806] The above values demonstrate statistical significance of the results.

[0807] Primer pairs are also optionally and preferably encompassed within the present invention; for example, for the above experiment, the following primer pair was used as a non-limiting illustrative example only of a suitable primer pair: AA383349_seg32F (SEQ ID NO: 359) forward primer; and AA383349_seg32R (SEQ ID NO: 360) (reverse primer.

[0808] The present invention also preferably encompasses any amplicon obtained through the use of any suitable primer pair; for example, for the above experiment, the following amplicon was obtained as a non-limiting illustrative example only of a suitable amplicon: AA383349_seg32 (SEQ ID NO: 361).

[0809] Expression of Homo sapiens protein phosphatase 2a, catalytic subunit, zeta isoform (PPP2CZ) transcripts detectable by or according to seg32—AA383349_seg32 (SEQ ID NO: 361) amplicon and primers AA383349_seg32F (SEQ ID NO: 359) and AA383349_seg32R (SEQ ID NO: 360) was further measured by real time PCR using enlarged panel as shown in Table 1_{—}7. In parallel the expression of four housekeeping genes—G6PD (GenBank Accession No. NM_{—}000402 (SEQ ID NO:339); G6PD amplicon (SEQ ID NO: 311)), RPL19 (GenBank Accession No. NM_{—}000981 (SEQ ID NO:342); RPL19 amplicon (SEQ ID NO: 320)), PBGD (GenBank Accession No. BC019323 (SEQ ID NO:336); amplicon—PBGD-amplicon (SEQ ID NO: 302)) and SDHA (GenBank Accession No. NM_{—}004168 (SEQ ID NO:335); amplicon—SDHA-amplicon (SEQ ID NO:299)) was measured similarly. For each RT sample, the expression of the above amplicon was normalized to the normalization factor calculated from the expression of these house keeping genes as described in normalization method 2 in the “materials and methods” section. The normalized quantity of each RT sample was then divided by the median of the quantities of the normal samples (sample numbers 43, 45, 46, 47, 48, 49, 50, 51, 52, 54, 56, 58, 59, 60, 61, 62, 63, 64, 65, 66, 67, 68 and 69, Table 1_{—}7 above), to obtain a value of fold up-regulation for each sample relative to the median of the normal samples.

[0810] FIG. 9B is a histogram showing over expression of the above-indicated Homo sapiens protein phosphatase 2a, catalytic subunit, zeta isoform (PPP2CZ) transcripts in cancerous Breast samples relative to the normal samples.

[0811] As is evident from FIG. 9B, the expression of Homo sapiens protein phosphatase 2a, catalytic subunit, zeta isoform (PPP2CZ) transcripts detectable by the above amplicon in cancer samples was significantly higher than in the non-cancerous samples (sample numbers 43, 45, 46, 47, 48, 49, 50, 51, 52, 54, 56, 58, 59, 60, 61, 62, 63, 64, 65, 66, 67, 68 and 69, Table 1_{—}7 above). Notably an over-expression of at least 5 fold was found in 24 out of 53 adenocarcinoma samples.

[0812] Statistical analysis was applied to verify the significance of these results, as described below.

[0813] The P value for the difference in the expression levels of Homo sapiens protein phosphatase 2a, catalytic subunit, zeta isoform (PPP2CZ) transcripts detectable by the above amplicon in Breast cancer samples versus the normal tissue samples was determined by T test as 3.19e-007.

[0814] Threshold of 5 fold over expression was found to differentiate between cancer and normal samples with P value of 2.07e-005 as checked by exact Fisher test.

[0815] The above values demonstrate statistical significance of the results.

[0816] Primer pairs are also optionally and preferably encompassed within the present invention; for example, for the above experiment, the following primer pair was used as a non-limiting illustrative example only of a suitable primer pair: AA383349_seg32F (SEQ ID NO: 359) forward primer; and AA383349_seg32R (SEQ ID NO: 360) reverse primer.

[0817] The present invention also preferably encompasses any amplicon obtained through the use of any suitable primer pair; for example, for the above experiment, the following amplicon was obtained as a non-limiting illustrative example only of a suitable amplicon: AA383349_seg32 (SEQ ID NO: 361).

Expression of Protein Phosphatase 2a AA383349 Transcripts which are Detectable by Amplicon as Depicted in Sequence Name AA383349_seg32 (SEQ ID NO: 361) in Different Normal Tissues.

[0818] Expression of protein phosphatase 2a transcripts detectable by or according to seg32—AA383349_seg32 (SEQ ID NO: 361) amplicon and primers AA383349_seg32F (SEQ ID NO: 359) and AA383349_seg32R (SEQ ID NO: 360) was measured by real time PCR. In parallel the expression of four housekeeping genes—SDHA (GenBank Accession No. NM_{—}004168 (SEQ ID NO:335); amplicon—SDHA-amplicon (SEQ ID NO:299)), Ubiquitin (GenBank Accession No. BC000449 (SEQ ID NO:341); amplicon—Ubiquitin-amplicon (SEQ ID NO: 317)), RPL19 (GenBank Accession No. NM_{—}000981 (SEQ ID NO:342); RPL19 amplicon (SEQ ID NO: 320)) and TATA box (GenBank Accession No. NM_{—}003194 (SEQ ID NO:343); TATA amplicon (SEQ ID NO: 323)) was measured similarly. For each RT sample, the expression of the above amplicon was normalized to the geometric mean of the quantities of the housekeeping genes. The normalized quantity of each RT sample was then divided by the median of the quantities of the breast samples (sample numbers 33, 34 and 35, Table 1_{—}9 above: “Tissue samples in normal panel”), to obtain a value of relative expression of each sample relative to the median of the breast samples.

[0819] FIG. 10A is a histogram showing Expression of protein phosphatase 2a AA383349 transcripts which are detectable by amplicon as depicted in sequence name AA383349_seg32 (SEQ ID NO: 361) in different normal tissues.

[0820] Expression of Homo sapiens protein phosphatase 2a, catalytic subunit, zeta isoform (PPP2CZ) transcripts detectable by or according to seg32—AA383349_seg32 (SEQ ID NO: 361) amplicon and primers AA383349_seg32F (SEQ ID NO: 359) and AA383349_seg32R (SEQ ID NO: 360) was further measured by real time PCR using updated panel as shown in Table 1_{—}10. In parallel the expression of three housekeeping genes—SDHA (GenBank Accession No. NM_{—}004168 (SEQ ID NO:335); amplicon—SDHA-amplicon (SEQ ID NO:299)), Ubiquitin (GenBank Accession No. BC000449 (SEQ ID NO:341); amplicon—Ubiquitin-amplicon (SEQ ID NO: 317)) and TATA box (GenBank Accession No. NM_{—}003194 (SEQ ID NO:343); TATA amplicon (SEQ ID NO: 323)) was measured similarly. For each RT sample, the expression of the above amplicon was normalized to the normalization factor calculated from the expression of these house keeping genes as described in normalization method 2 in the “materials and methods” section. The normalized quantity of each RT sample was then divided by the median of the quantities of the breast samples (sample numbers 41, 42 and 43, Table 1_{—}10 above), to obtain a value of relative expression of each sample relative to the median of the breast samples.

[0821] FIG. 10B is a histogram showing Expression of protein phosphatase 2a AA383349 transcripts which are detectable by amplicon as depicted in sequence name AA383349_seg32 (SEQ ID NO: 361) in different normal tissues.

Expression of Homo sapiens Protein Phosphatase 2a, Catalytic Subunit, Zeta Isoform (PPP2CZ) AA383349 Transcripts which are Detectable by Amplicon as Depicted in Sequence Name AA383349_Seg32 (SEQ ID NO: 361) in Normal, Benign and Cancerous Ovary Tissues

[0822] Expression of Homo sapiens protein phosphatase 2a, catalytic subunit, zeta isoform (PPP2CZ) transcripts detectable by or according to seg32, AA383349_seg32 (SEQ ID NO: 361) amplicon and primers AA383349_seg32F (SEQ ID NO: 359) AA383349_seg32R (SEQ ID NO: 360) was measured by real time PCR. In parallel the expression of three housekeeping genes—HPRT1 (GenBank Accession No. NM_{—}000194 (SEQ ID NO:337); amplicon—HPRT1-amplicon (SEQ ID NO: 305) (SEQ ID NO: 305)), G6PD (GenBank Accession No. NM_{—}000402 (SEQ ID NO:339); G6PD amplicon (SEQ ID NO: 311)) and SDHA (GenBank Accession No. NM_{—}004168 (SEQ ID NO:335); amplicon—SDHA-amplicon (SEQ ID NO:299)) was measured similarly For each RT sample, the expression of the above amplicon was normalized to the normalization factor calculated from the expression of these house keeping genes as described in normalization method 2 in the “materials and methods” section. The normalized quantity of each RT sample was then divided by the median of the quantities of the normal samples (Sample Nos 52, 53, 54, 55, 56, 57, 58, 59, 60, 61, 62, 63, 64, 65, 66, 67, 68, 69, 70, 71, 72, 73, 74, 75, 76, 77 and 78, Table 1_{—}5, above), to obtain a value of fold differential expression for each sample relative to the median of the normal samples.

[0823] In one experiment that was carried out no differential expression in the cancerous samples relative to the normal samples was observed.

[0824] Primer pairs are also optionally and preferably encompassed within the present invention; for example, for the above experiment, the following primer pair was used as a non-limiting illustrative example only of a suitable primer pair: AA383349_seg32F (SEQ ID NO: 359) forward primer; and AA383349_seg32R (SEQ ID NO: 360) reverse primer.

[0825] The present invention also preferably encompasses any amplicon obtained through the use of any suitable primer pair; for example, for the above experiment, the following amplicon was obtained as a non-limiting illustrative example only of a suitable amplicon: AA383349_seg32 (SEQ ID NO: 361).

Expression of Homo sapiens Protein Phosphatase 2a, Catalytic Subunit, Zeta Isoform (PPP2CZ) AA383349 Transcripts which are Detectable by Amplicon as Depicted in Sequence Name AA383349_Seg32 (SEQ ID NO: 361) in Normal and Cancerous Lung Tissues

[0826] Expression of Homo sapiens protein phosphatase 2a, catalytic subunit, zeta isoform (PP2CZ) transcripts detectable by or according to seg32, AA383349_seg32 (SEQ ID NO: 361) amplicon and primers AA383349_seg32F (SEQ ID NO: 359) AA383349_seg32R (SEQ ID NO: 360) was measured by real time PCR. In parallel the expression of four housekeeping genes—PBGD (GenBank Accession No. BC019323 (SEQ ID NO:336); amplicon—PBGD-amplicon (SEQ ID NO: 302)), HPRT1 (GenBank Accession No. NM_{—}000194 (SEQ ID NO:337); amplicon—HPRT1-amplicon (SEQ ID NO: 305) (SEQ ID NO: 305)), Ubiquitin (GenBank Accession No. BC000449 (SEQ ID NO:341); amplicon—Ubiquitin-amplicon (SEQ ID NO: 317)) and SDHA (GenBank Accession No. NM_{—}004168 (SEQ ID NO:335); amplicon—SDHA-amplicon (SEQ ID NO:299)) was measured similarly. For each RT sample, the expression of the above amplicon was normalized to the normalization factor calculated from the expression of these house keeping genes as described in normalization method 2 in the “materials and methods” section. The normalized quantity of each RT sample was then divided by the median of the quantities of the normal samples (Sample Nos 51, 52, 53, 54, 55, 56, 57, 58, 59, 60, 61, 62, 63, 64, 69 and 70, Table 1_{—}6, above), to obtain a value of fold differential expression for each sample relative to the median of the normal samples.

[0827] In one experiment that was carried out no differential expression in the cancerous samples relative to the normal samples was observed.

[0828] Primer pairs are also optionally and preferably encompassed within the present invention; for example, for the above experiment, the following primer pair was used as a non-limiting illustrative example only of a suitable primer pair: AA383349_seg32F (SEQ ID NO: 359) forward primer; and AA383349_seg32R (SEQ ID NO: 360) reverse primer.

[0829] The present invention also preferably encompasses any amplicon obtained through the use of any suitable primer pair; for example, for the above experiment, the following amplicon was obtained as a non-limiting illustrative example only of a suitable amplicon: AA383349_seg32 (SEQ ID NO: 361).

[0830] Expression of Homo sapiens protein phosphatase 2a, catalytic subunit, zeta isoform (PPP2CZ) AA383349 transcripts which are detectable by amplicon as depicted in sequence name AA383349_seg32 (SEQ ID NO: 361) in normal and cancerous colon tissues

[0831] Expression of Homo sapiens protein phosphatase 2a, catalytic subunit, zeta isoform (PPP2CZ) transcripts detectable by or according to seg32, AA383349_seg32 (SEQ ID NO: 361) amplicon and primers AA383349_seg32F (SEQ ID NO: 359) AA383349_seg32R (SEQ ID NO: 360) was measured by real time PCR. In parallel the expression of three housekeeping genes—PBGD (GenBank Accession No. BC019323 (SEQ ID NO:336); amplicon—PBGD-amplicon (SEQ ID NO: 302)), BPRT1 (GenBank Accession No. NM_{—}000194 (SEQ ID NO:337); amplicon—HPRTI-amplicon (SEQ ID NO: 305) (SEQ ID NO: 305)), G6PD (GenBank Accession No. NM_{—}000402 (SEQ ID NO:339); G6PD amplicon (SEQ ID NO: 311)), was measured similarly. For each RT sample, the expression of the above amplicon was normalized to the normalization factor calculated from the expression of these house keeping genes as described in normalization method 2 in the “materials and methods” section. The normalized quantity of each RT sample was then divided by the median of the quantities of the normal samples (Sample Nos52, 42, 43, 44, 45, 46, 47, 48, 49, 50, 51, 53, 54, 55, 56, 57, 58, 59, 60, 61, 62, 63 and 64, Table 1_{—}8, above), to obtain a value of fold differential expression for each sample relative to the median of the normal samples.

[0832] In one experiment that was carried out no differential expression in the cancerous samples relative to the normal samples was observed.

[0833] Primer pairs are also optionally and preferably encompassed within the present invention; for example, for the above experiment, the following primer pair was used as a non-limiting illustrative example only of a suitable primer pair: AA383349_seg32F (SEQ ID NO: 359) forward primer; and AA383349_seg32R (SEQ ID NO: 360) reverse primer.

[0834] The present invention also preferably encompasses any amplicon obtained through the use of any suitable primer pair; for example, for the above experiment, the following amplicon was obtained as a non-limiting illustrative example only of a suitable amplicon: AA383349_seg32 (SEQ ID NO: 361).

### Description for Cluster AA583399

[0835] Cluster AA583399 features 16 transcript(s) and 20 segment(s) of interest, the names for which are given in Tables 22 and 23, respectively, the sequences themselves are given in the “Sequence Listing” of the application. The selected protein variants are given in table 24.

TABLE 22
Transcripts of interest
Transcript Name

AA583399_PEA_1_T0 (SEQ ID NO: 37)
AA583399_PEA_1_T1 (SEQ ID NO: 38)
AA583399_PEA_1_T2 (SEQ ID NO: 39)
AA583399_PEA_1_T3 (SEQ ID NO: 40)
AA583399_PEA_1_T4 (SEQ ID NO: 41)
AA583399_PEA_1_T5 (SEQ ID NO: 42)
AA583399_PEA_1_T6 (SEQ ID NO: 43)
AA583399_PEA_1_T7 (SEQ ID NO: 44)
AA583399_PEA_1_T8 (SEQ ID NO: 45)
AA583399_PEA_1_T9 (SEQ ID NO: 46)
AA583399_PEA_1_T10 (SEQ ID NO: 47)
AA583399_PEA_1_T11 (SEQ ID NO: 48)
AA583399_PEA_1_T12 (SEQ ID NO: 49)
AA583399_PEA_1_T15 (SEQ ID NO: 50)
AA583399_PEA_1_T16 (SEQ ID NO: 51)
AA583399_PEA_1_T17 (SEQ ID NO: 52)

TABLE 23
Segments of interest
Segment Name

AA583399_PEA_1_node_0 (SEQ ID NO: 53)
AA583399_PEA_1_node_3 (SEQ ID NO: 54)
AA583399_PEA_1_node_9 (SEQ ID NO: 55)
AA583399_PEA_1_node_10 (SEQ ID NO: 56)
AA583399_PEA_1_node_12 (SEQ ID NO: 57)
AA583399_PEA_1_node_14 (SEQ ID NO: 58)
AA583399_PEA_1_node_21 (SEQ ID NO: 59)
AA583399_PEA_1_node_24 (SEQ ID NO: 60)
AA583399_PEA_1_node_25 (SEQ ID NO: 61)
AA583399_PEA_1_node_29 (SEQ ID NO: 62)
AA583399_PEA_1_node_1 (SEQ ID NO: 63)
AA583399_PEA_1_node_2 (SEQ ID NO: 64)
AA583399_PEA_1_node_4 (SEQ ID NO: 65)
AA583399_PEA_1_node_5 (SEQ ID NO: 66)
AA583399_PEA_1_node_6 (SEQ ID NO: 67)
AA583399_PEA_1_node_7 (SEQ ID NO: 68)
AA583399_PEA_1_node_8 (SEQ ID NO: 69)
AA583399_PEA_1_node_11 (SEQ ID NO: 70)
AA583399_PEA_1_node_19 (SEQ ID NO: 71)
AA583399_PEA_1_node_27 (SEQ ID NO: 72)

TABLE 24
Proteins of interest

| Protein Name | Corresponding Transcript(s) |
|---|---|
| AA583399_PEA_1_P3 (SEQ ID NO: 77) | AA583399_PEA_1_T1 (SEQ ID NO: 38); |
| | AA583399_PEA_1_T6 (SEQ ID NO: 43); |
| | AA583399_PEA_1_T9 (SEQ ID NO: 46) |
| AA583399_PEA_1_P2 (SEQ ID NO: 78) | AA583399_PEA_1_T3 (SEQ ID NO: 40); |
| | AA583399_PEA_1_T4 (SEQ ID NO: 41); |
| | AA583399_PEA_1_T5 (SEQ ID NO: 42) |
| AA583399_PEA_1_P4 (SEQ ID NO: 79) | AA583399_PEA_1_T7 (SEQ ID NO: 44) |
| AA583399_PEA_1_P5 (SEQ ID NO: 80) | AA583399_PEA_1_T8 (SEQ ID NO: 45) |
| AA583399_PEA_1_P6 (SEQ ID NO: 81) | AA583399_PEA_1_T12 (SEQ ID NO: 49); |
| | AA583399_PEA_1_T16 (SEQ ID NO: 51) |
| AA583399_PEA_1_P8 (SEQ ID NO: 82) | AA583399_PEA_1_T17 (SEQ ID NO: 52) |
| AA583399_PEA_1_P10 (SEQ ID NO: 83) | AA583399_PEA_1_T0 (SEQ ID NO: 37) |
| AA583399_PEA_1_P11 (SEQ ID NO: 84) | AA583399_PEA_1_T2 (SEQ ID NO: 39) |
| AA583399_PEA_1_P12 (SEQ ID NO: 85) | AA583399_PEA_1_T10 (SEQ ID NO: 47); |
| | AA583399_PEA_1_T11 (SEQ ID NO: 48) |
| AA583399_PEA_1_P14 (SEQ ID NO: 86) | AA583399_PEA_1_T15 (SEQ ID NO: 50) |

[0836] These sequences are variants of the known protein Myeloma overexpressed gene protein (SEQ ID NO: 73) (SwissProt accession identifier MYEO_HUMAN, known also according to the synonyms Oncogene in multiple myeloma), referred to herein as the previously known protein.

[0837] Known polymorphisms for this sequence are as shown in Table 25.

TABLE 25
Amino acid mutations for Known Protein

| SNP position(s) | |
|---|---|
| on amino | |
| acid sequence | Comment |
| 159 | A -> V (in dbSNP: 7103126). /FTId = VAR_016603. |
| 198 | R -> Q |
| 219 | V -> M |
| 271 | G -> R |

[0838] WO20051B0000928 and U.S. patent application Ser. No. 11/050,875, filed on Jan. 27, 2005 and assigned to the applicant of the present invention, disclose polynucleotides and their respective encoded polypeptides of AA583399 contig, and assays and methods of use thereof in the diagnosis of colon cancer. In these applications the AA583399 sequences are described as being overexpressed in brain malignant tumors, epithelial malignant tumors, normal and cancerous colon tissues.

[0839] Unexpectedly, AA583399 variants and known wild type polynucleotides and their respective encoded polypeptides are now disclosed to be differentially expressed in ovarian cancer and lung cancer, and therefore may be contemplated within the scope of the present invention as diagnostic markers for these diseases.

[0840] Cluster AA583399 can be used as a diagnostic marker according to overexpression of transcripts of this cluster in cancer. Expression of such transcripts in normal tissues is also given according to the previously described methods. The term “number” in the left hand column of the table and the numbers on the y-axis of the FIG. 11 refer to weighted expression of ESTs in each category, as “parts per million” (ratio of the expression of ESTs for a particular cluster to the expression of all ESTs in that category, according to parts per million).

[0841] Overall, the following results were obtained as shown with regard to the histograms in FIG. 11 and Table 26. This cluster is overexpressed (at least at a minimum level) in the following pathological conditions: brain malignant tumors, epithelial malignant tumors, a mixture of malignant tumors from different tissues and gastric carcinoma.

TABLE 26
Normal tissue distribution

| Name of Tissue | Number |
|---|---|
| bone | 32 |
| brain | 0 |
| colon | 0 |
| epithelial | 4 |
| general | 2 |
| kidney | 0 |
| liver | 0 |
| lung | 2 |
| lymph nodes | 0 |
| breast | 79 |
| ovary | 0 |
| pancreas | 0 |
| prostate | 0 |
| skin | 0 |
| stomach | 0 |

TABLE 27
P values and ratios for expression in cancerous tissue

| Name of Tissue | P1 | P2 | SP1 | R3 | SP2 | R4 |
|---|---|---|---|---|---|---|
| bone | 9.2e−01 | 5.8e−01 | 1 | 0.5 | 9.1e−01 | 0.8 |
| brain | 9.8e−01 | 1.4e−01 | 1 | 0.8 | 2.0e−09 | 11.1 |
| colon | 1.6e−01 | 7.3e−02 | 3.4e−01 | 2.5 | 2.7e−01 | 2.7 |
| epithelial | 3.0e−03 | 1.3e−04 | 1.1e−01 | 2.3 | 5.4e−06 | 4.1 |
| general | 1.1e−05 | 3.2e−10 | 2.0e−03 | 4.5 | 1.1e−17 | 10.7 |
| kidney | 6.5e−01 | 5.1e−01 | 1 | 1.1 | 7.0e−01 | 1.5 |
| liver | 1 | 1.3e−01 | 1 | 1.0 | 1.6e−01 | 2.2 |
| lung | 1.7e−01 | 2.7e−01 | 1.7e−01 | 3.5 | 2.4e−01 | 2.5 |
| lymph nodes | 1 | 5.7e−01 | 1 | 1.0 | 5.8e−01 | 1.7 |
| breast | 8.8e−01 | 8.6e−01 | 9.0e−01 | 0.5 | 8.5e−01 | 0.6 |
| ovary | 1.6e−01 | 1.9e−01 | 1 | 1.1 | 1 | 1.1 |
| pancreas | 3.3e−01 | 4.4e−01 | 4.2e−01 | 2.4 | 5.3e−01 | 1.9 |
| prostate | 1 | 7.8e−01 | 1 | 1.0 | 5.6e−01 | 1.7 |
| skin | 1 | 4.4e−01 | 1 | 1.0 | 6.4e−01 | 1.6 |
| stomach | 3.6e−01 | 1.3e−01 | 1 | 1.1 | 1.8e−03 | 3.8 |

[0842] As noted above, cluster AA583399 features 16 transcript(s), which were listed in Table 22 above. These transcript(s) encode for protein(s) which are variant(s) of protein Myeloma overexpressed gene protein (SEQ ID NO: 73). A description of each variant protein according to the present invention is now provided.

[0843] Variant protein AA583399_PEA_{—}1_P3 (SEQ ID NO: 77) according to the present invention has an amino acid sequence as given in the “Sequence Listing” of the application; it is encoded by transcript(s) AA583399_PEA_{—}1_T1 (SEQ ID NO: 38). The location of the variant protein was determined according to results from a number of different software programs and analyses, including analyses from SignalP and other specialized programs. The variant protein is believed to be secreted. The protein localization is believed to be secreted because both signal-peptide prediction programs predict that this protein has a signal peptide.

[0844] Variant protein AA583399_PEA_{—}1_P3 (SEQ ID NO: 77) also has the following non-silent SNPs (Single Nucleotide Polymorphisms) as listed in Table 28, (given according to their position(s) on the amino acid sequence, with the alternative amino acid(s) listed).

TABLE 28
Amino acid mutations

| SNP position(s) on | Alternative |
|---|---|
| amino acid sequence | amino acid(s) |
| 159 | V -> A |
| 198 | R -> Q |
| 219 | M -> V |
| 271 | G -> R |
| 284 | P -> T |

[0845] Variant protein AA583399_PEA_{—}1P3 (SEQ ID NO: 77) is encoded by the following transcript(s): AA583399_PEA_{—}1_T1 (SEQ ID NO: 38), for which the coding portion starts at position 587 and ends at position 1525. The transcript also has the following SNPs as listed in Table 29 (given according to their position on the nucleotide sequence, with the alternative nucleic acid listed).

TABLE 29
Nucleic acid SNPs

| | SNP position on nucleotide |
|---|---|
| Polymorphism | sequence |
| A -> G | 380, 1241 |
| C -> T | 805, 1653 |
| T -> C | 1062 |
| G -> A | 1179 |
| G -> C | 1397 |
| C -> A | 1436 |
| T -> G | 1657 |

[0846] Variant protein AA583399_PEA_{—}1_P2 (SEQ ID NO: 78) according to the present invention has an amino acid sequence as given in the “Sequence Listing” of the application; it is encoded by transcript(s) AA583399_PEA_{—}1_T3 (SEQ ID NO: 40). An alignment is given to the known protein (Myeloma overexpressed gene protein, SEQ ID NOs:73-76) in the alignment table, on the attached CDROM. One or more alignments to one or more previously published protein sequences are given in the alignment table, on the attached CDROM. A brief description of the relationship of the variant protein according to the present invention to each such aligned protein is as follows:

[0847] Comparison report between AA583399_PEA_{—}1_P2 (SEQ ID NO: 78) and MYEO_HUMAN_V1 (SEQ ID NO: 74):

[0848] 1. An isolated chimeric polypeptide encoding for AA583399_PEA_{—}1_P2 (SEQ ID NO: 78), comprising a first amino acid sequence being at least about 90% homologous to MFTRQAGHFVEGSKAGRSRGRLCLSQALRVAVRGAFVSLWFAAGAGDRERNKGDKGAQTGAGLSQEAE DVDVSRARRVTDAPQGTLCGTGNRNSGSQSARVVGVAHLGEAFRVGVEQAISSCPEEVHGRHGLSMEIM WARMDVALRSPGRGLLAGAGALCMTLAESSCPDYERGRRACLTLHRHPTPHCSTWGLPLRVAGSWLTV VTVEALGGWRMGVRRTGQVGPTMHPPVSGASPLLLHHLLLLIIILTC corresponding to amino acids 59-313 of MYEO_HUMAN_V1 (SEQ ID NO: 74), which also corresponds to amino acids 1-255 of AA583399_PEA_{—}1_P2 (SEQ ID NO: 78).

[0849] It should be noted that the known protein sequence (MYEO_HUMAN (SEQ ID NO:431)) has one or more changes than the sequence given in SEQ ID NO:74, and named as being the amino acid sequence for MYEO_HUMAN_V1 (SEQ ID NO: 74). These changes were previously known to occur and are listed in the table below.

TABLE 30
Changes to MYEO_HUMAN_V1 (SEQ ID NO: 74)

| SNP position(s) on amino | |
|---|---|
| acid sequence | Type of change |
| 160 | variant |
| 220 | conflict |

[0850] The location of the variant protein was determined according to results from a number of different software programs and analyses, including analyses from SignalP and other specialized programs. The variant protein is believed to be secreted. The protein localization is believed to be secreted because one of the two signal-peptide prediction programs (HMM:Signal peptide,NN:NO) predicts that this protein has a signal peptide.

[0851] Variant protein AA583399_PEA_{—}1_P2 (SEQ ID NO: 78) is encoded by the following transcript(s): AA583399_PEA_{—}1_T3 (SEQ ID NO: 40), for which the coding portion starts at position 689 and ends at position 1453. The transcript also has the following SNPs as listed in Table 31 (given according to their position on the nucleotide sequence, with the alternative nucleic acid listed).

TABLE 31
Nucleic acid SNPs

| | SNP position on nucleotide |
|---|---|
| Polymorphism | sequence |
| A -> G | 380, 1169 |
| C -> T | 733, 1581 |
| T -> C | 990 |
| G -> A | 1107 |
| G -> C | 1325 |
| C -> A | 1364 |
| T -> G | 1585 |

[0852] Variant protein AA583399_PEA_{—}1_P4 (SEQ ID NO: 79) according to the present invention has an amino acid sequence as given in the “Sequence Listing” of the application; it is encoded by transcript(s) AA583399_PEA_{—}1_T7 (SEQ ID NO: 44). An alignment is given to the known protein (Myeloma overexpressed gene protein, SEQ ID NOs:73-76) in the alignment table, on the attached CDROM. One or more alignments to one or more previously published protein sequences are given in the alignment table, on the attached CDROM. A brief description of the relationship of the variant protein according to the present invention to each such aligned protein is as follows:

[0853] Comparison report between AA583399_PEA_{—}1_P4 (SEQ ID NO: 79) and MYEO_HUMAN_V1 (SEQ ID NO: 74):

[0854] 1. An isolated chimeric polypeptide encoding for AA583399_PEA_{—}1_P4 (SEQ ID NO: 79), comprising a first amino acid sequence being at least about 70%, optionally at least 80%, preferably at least 85%, more preferably at least 90% and most preferably at least 95% homologous to a polypeptide having the sequence MSDLFIGFLVCSLSPLGTGTRCSCSPG (SEQ ID NO: 531) corresponding to amino acids 1-27 of AA583399_PEA_{—}1_P4 (SEQ ID NO: 79), and a second amino acid sequence being at least about 90% homologous to RNSGSQSARVVGVAHLGEAFRVGVEQAISSCPEEVHGRHGLSMEIMWARMDVALRSPGRGLLAG AGALCMTLAESSCPDYERGRRACLTLHRHPTPHCSTWGLPLRVAGSWLTVVTVEALGGWRMGVRRTGQ VGPTMHPPPVSGASPLLLHHLLLLLLIIILTC corresponding to amino acids 150-313 of MYEO_HUMAN_V1 (SEQ ID NO: 74), which also corresponds to amino acids 28-191 of AA583399_PEA 11P4 (SEQ ID NO: 79), wherein said first amino acid sequence and second amino acid sequence are contiguous and in a sequential order.

[0855] 2. An isolated polypeptide encoding for a head of AA583399_PEA_{—}1_P4 (SEQ ID NO: 79), comprising a polypeptide being at least 70%, optionally at least about 80%, preferably at least about 85%, more preferably at least about 90% and most preferably at least about 95% homologous to the sequence

| | |
|---|---|
| MSDLFIGFLVCSLSPLGTGTRCSCSPG | (SEQ ID NO: 531) |
| of | |
| AA583399_PEA_1_P4. | (SEQ ID NO: 79) |

[0856] The location of the variant protein was determined according to results from a number of different software programs and analyses, including analyses from SignalP and other specialized programs. The variant protein is believed to be secreted. The protein localization is believed to be secreted because both signal-peptide prediction programs predict that this protein has a signal peptide.

[0857] Variant protein AA583399_PEA_{—}1_P4 (SEQ ID NO: 79) also has the following non-silent SNPs (Single Nucleotide Polymorphisms) as listed in Table 32, (given according to their position(s) on the amino acid sequence, with the alternative amino acid(s) listed).

TABLE 32
Amino acid mutations

| SNP position(s) on | Alternative |
|---|---|
| amino acid sequence | amino acid(s) |
| 37 | V -> A |
| 76 | R -> Q |
| 97 | M -> V |
| 149 | G -> R |
| 162 | P -> T |

[0858] Variant protein AA583399_PEA_{—}1_P4 (SEQ ID NO: 79) is encoded by the following transcript(s): AA583399_PEA_{—}1_T7 (SEQ ID NO: 44), for which coding portion starts at position 789 and ends at position 1361. The transcript also has the following SNPs as listed in Table 33 (given according to their position on the nucleotide sequence, with the alternative nucleic acid listed).

TABLE 33
Nucleic acid SNPs

| | SNP position on nucleotide |
|---|---|
| Polymorphism | sequence |
| A -> G | 380, 1077 |
| T -> C | 898 |
| G -> A | 1015 |
| G -> C | 1233 |
| C -> A | 1272 |
| C -> T | 1489 |
| T -> G | 1493 |

[0859] Variant protein AA583399_PEA_{—}1_P5 (SEQ ID NO: 80) according to the present invention has an amino acid sequence as given in the “Sequence Listing” of the application; it is encoded by transcript(s) AA583399_PEA_{—}1_T8 (SEQ ID NO: 45). An alignment is given to the known protein (Myeloma overexpressed gene protein SEQ ID NOs:73-76) in the alignment table, on the attached CDROM. One or more alignments to one or more previously published protein sequences are given in the alignment table, on the attached CDROM. A brief description of the relationship of the variant protein according to the present invention to each such aligned protein is as follows:

[0860] Comparison report between AA583399_PEA_{—}1_P5 (SEQ ID NO: 80) and MYEO_HUMAN_V₂ (SEQ ID NO: 75):

[0861] 1. An isolated chimeric polypeptide encoding for AA583399_PEA_{—}1_P5 (SEQ ID NO: 80), comprising a first amino acid sequence being at least about 90% homologous to MEIMWARMDVALRSPGRGLLAGAGALCMTLAESSCPDYERGRRACLTLHRBPTPHCSTWGLPLRVAGS WLTVVTVEALGGWRMGVRRTGQVGPTMHPPPVSGASPLLZLHHLLLLLLIIILLTC corresponding to amino acids 192-313 of MYEO_HUMAN_V2 (SEQ ID NO: 75), which also corresponds to amino acids 1-122 of AA583399_PEA_{—}1_P5 (SEQ ID NO: 80).

[0862] It should be noted that the known protein sequence (MYEO_HUMAN (SEQ ID NO:431)) has one or more changes than the sequence given in SEQ ID NO: 75, and named as being the amino acid sequence for MYEO_HUMAN_V2 (SEQ ID NO: 75). These changes were previously known to occur and are listed in the table below.

TABLE 34
Changes to MYEO_HUMAN_V2 (SEQ ID NO: 75)

| SNP position(s) on amino | |
|---|---|
| acid sequence | Type of change |
| 220 | conflict |

[0863] The location of the variant protein was determined according to results from a number of different software programs and analyses, including analyses from SignalP and other specialized programs. The variant protein is believed to be secreted. The protein localization is believed to be secreted because one of the two signal-peptide prediction programs (HMM:Signal peptide,NN:NO) predicts that this protein has a signal peptide.

[0864] Variant protein AA583399_PEA_{—}1_P5 (SEQ ID NO: 80) also has the following non-silent SNPs (Single Nucleotide Polymorphisms) as listed in Table 35, (given according to their position(s) on the amino acid sequence, with the alternative amino acid(s) listed).

TABLE 35
Amino acid mutations

| SNP position(s) on amino acid | |
|---|---|
| sequence | Alternative amino acid(s) |
| 7 | R -> Q |
| 28 | M -> V |
| 80 | G -> R |
| 93 | P -> T |

[0865] Variant protein AA583399_PEA_{—}1_P5 (SEQ ID NO: 80) is encoded by the following transcript(s): AA583399_PEA_{—}1_T8 (SEQ ID NO: 45), for which the coding portion starts at position 849 and ends at position 1214. The transcript also has the following SNPs as listed in Table 36 (given according to their position on the nucleotide sequence, with the alternative nucleic acid listed; AA583399_PEA_{—}1_P5 (SEQ ID NO: 80)).

TABLE 36
Nucleic acid SNPs

| | SNP position on nucleotide |
|---|---|
| Polymorphism | sequence |
| A -> G | 380, 930 |
| C -> T | 494, 1342 |
| T -> C | 751 |
| G -> A | 868 |
| G -> C | 1086 |
| C -> A | 1125 |
| T -> G | 1346 |

[0866] Variant protein AA583399_PEA_{—}1_P6 (SEQ ID NO: 81) according to the present invention has an amino acid sequence as given in the “Sequence Listing” of the application; it is encoded by transcript(s) AA583399_PEA_{—}1_T12 (SEQ ID NO: 49). The location of the variant protein was determined according to results from a number of different software programs and analyses, including analyses from SignalP and other specialized programs. The variant protein is believed to be located intracellularly with regard to the cell. The protein localization is believed to be intracellularly because neither of the trans-membrane region prediction programs predicted a trans-membrane region for this protein. In addition both signal-peptide prediction programs predict that this protein is a non-secreted protein.

[0867] Variant protein AA583399_PEA_{—}1_P6 (SEQ ID NO: 81) is encoded by the following transcript(s): AA583399_PEA_{—}1_T12 (SEQ ID NO: 49), for which the coding portion starts at position 39 and ends at position 371. The transcript also has the following SNPs as listed in Table 37 (given according to their position on the nucleotide sequence, with the alternative nucleic acid listed).

TABLE 37
Nucleic acid SNPs

| | SNP position on nucleotide |
|---|---|
| Polymorphism | sequence |
| A -> G | 198, 1145 |
| C -> A | 538 |
| C -> G | 659 |
| C -> T | 1009 |

[0868] Variant protein AA583399_PEA_{—}1_P8 (SEQ ID NO: 82) according to the present invention has an amino acid sequence as given in the “Sequence Listing” of the application; it is encoded by transcript(s) AA583399_PEA_{—}1_T17 (SEQ ID NO: 52). The location of the variant protein was determined according to results from a number of different software programs and analyses, including analyses from SignalP and other specialized programs. The variant protein is believed to be located intracellularly with regard to the cell. The protein localization is believed to be intracellularly because neither of the trans-membrane region prediction programs predicted a trans-membrane region for this protein. In addition both signal-peptide prediction programs predict that this protein is a non-secreted protein.

[0869] Variant protein AA583399_PEA_{—}1_P8 (SEQ ID NO: 82) is encoded by the following transcript(s): AA583399_PEA_{—}1_T17 (SEQ ID NO: 52), for which the coding portion starts at position 191 and ends at position 400.

[0870] Variant protein AA583399_PEA_{—}1_P10 (SEQ ID NO: 83) according to the present invention has an amino acid sequence as given in the “Sequence Listing” of the application; it is encoded by transcript(s) AA583399 PEA_{—}1_T0 (SEQ ID NO: 37). An alignment is given to the known protein (Myeloma overexpressed gene protein SEQ ID NOs:73-76) in the alignment table, on the attached CDROM. One or more alignments to one or more previously published protein sequences are given in the alignment table, on the attached CDROM. A brief description of the relationship of the variant protein according to the present invention to each such aligned protein is as follows:

[0871] Comparison report between AA583399_PEA_{—}1_P10 (SEQ ID NO: 83) and MYEO_HUMAN_V3 (SEQ ID NO: 76):

[0872] 1. An isolated chimeric polypeptide encoding for AA583399_PEA_{—}1P10 (SEQ ID NO: 83), comprising a first amino acid sequence being at least about 90% homologous to MFTRQAGHFVEGSKAGRSRGRLCLSQALRVAVRGAFVSLWFAAGAGDRERNKGDKGAQTGAGLSQEAE DVDVSRARRVTDAPQGTLCGTGNRNSGSQSARAVGVAHLGEAFRVGVEQAISSCPEEVHGRHGLSMEIM WAQMDVALRSPGRGLLAGAGALCMTLAESSCPDYERGRRACLTLHRHPTPHCSTWGLPLRVAGSWLTV VTVEALGRWRMGVRRTGQVGPTMHPPVSGASPLLLHHLLLLLLIIILTC corresponding to amino acids 59-313 of MYEO_HUMAN_V3 (SEQ ID NO: 76), which also corresponds to amino acids 1-255 of AA583399_PEA_{—}1_P10 (SEQ ID NO: 83).

[0873] It should be noted that the known protein sequence (MYEO_HUMAN (SEQ ID NO:431)) has one or more changes than the sequence given in SEQ ID NO:76, and named as being the amino acid sequence for MYEO_HUMAN_V3 (SEQ ID NO: 76). These changes were previously known to occur and are listed in the table below.

TABLE 38
Changes to MYEO_HUMAN_V3 (SEQ ID NO: 76)

| SNP position(s) on amino | |
|---|---|
| acid sequence | Type of change |
| 199 | conflict |
| 220 | conflict |
| 272 | conflict |

[0874] The location of the variant protein was determined according to results from a number of different software programs and analyses, including analyses from SignalP and other specialized programs. The variant protein is believed to be secreted. The protein localization is believed to be secreted because one of the two signal-peptide prediction programs (HMM:Signal peptide,NN:NO) predicts that this protein has a signal peptide.

[0875] Variant protein AA583399_PEA_{—}1_P10 (SEQ ID NO: 83) also has the following non-silent SNPs (Single Nucleotide Polymorphisms) as listed in Table 39, (given according to their position(s) on the amino acid sequence, with the alternative amino acid(s) listed).

TABLE 39
Amino acid mutations

| SNP position(s) on amino acid | |
|---|---|
| sequence | Alternative amino acid(s) |
| 101 | A -> V |
| 140 | Q -> R |
| 161 | M -> V |
| 213 | R -> G |
| 226 | P -> T |

[0876] Variant protein AA583399_PEA_{—}1_P10 (SEQ ID NO: 83) is encoded by the following transcript(s): AA583399_PEA_{—}1_T0 (SEQ ID NO: 37), for which the coding portion starts at position 857 and ends at position 1621. The transcript also has the following SNPs as listed in Table 40 (given according to their position on the nucleotide sequence, with the alternative nucleic acid listed).

TABLE 40
Nucleic acid SNPs

| | SNP position on nucleotide |
|---|---|
| Polymorphism | sequence |
| A -> G | 380, 1337 |
| C -> T | 901, 1749 |
| T -> C | 1158 |
| G -> A | 1275 |
| G -> C | 1493 |
| C -> A | 1532 |
| T -> G | 1753 |

[0877] Variant protein AA583399_PEA_{—}1_P1 (SEQ ID NO: 84) according to the present invention has an amino acid sequence as given in the “Sequence Listing” of the application; it is encoded by transcript(s) AA583399_PEA_{—}1_T2 (SEQ ID NO: 39). The location of the variant protein was determined according to results from a number of different software programs and analyses, including analyses from SignalP and other specialized programs. The variant protein is believed to be secreted. The protein localization is believed to be secreted because both signal-peptide prediction programs predict that this protein has a signal peptide.

[0878] Variant protein AA583399_PEA_{—}1_P11 (SEQ ID NO: 84) also has the following non-silent SNPs (Single Nucleotide Polymorphisms) as listed in Table 41, (given according to their position(s) on the amino acid sequence, with the alternative amino acid(s) listed).

TABLE 41
Amino acid mutations

| SNP position(s) on amino acid | |
|---|---|
| sequence | Alternative amino acid(s) |
| 159 | A -> V |
| 198 | R -> Q |
| 219 | V -> M |
| 271 | G -> R |
| 284 | P -> T |

[0879] Variant protein AA583399_PEA_{—}1_P11 (SEQ ID NO: 84) is encoded by the following transcript(s): AA583399_PEA_{—}1_T2 (SEQ ID NO: 39), for which the coding portion starts at position 493 and ends at position 1431. The transcript also has the following SNPs as listed in Table 42 (given according to their position on the nucleotide sequence, with the alternative nucleic acid listed).

TABLE 42
Nucleic acid SNPs

| | SNP position on nucleotide |
|---|---|
| Polymorphism | sequence |
| A -> G | 380, 1147 |
| C -> T | 711, 1559 |
| T -> C | 968 |
| G -> A | 1085 |
| G -> C | 1303 |
| C -> A | 1342 |
| T -> G | 1563 |

[0880] Variant protein AA583399_PEA_{—}1_P12 (SEQ ID NO: 85) according to the present invention has an amino acid sequence as given in the “Sequence Listing” of the application; it is encoded by transcript(s) AA583399_PEA_{—}1_T10 (SEQ ID NO: 47) and AA583399_PEA_{—}1_T11 (SEQ ID NO: 48). The location of the variant protein was determined according to results from a number of different software programs and analyses, including analyses from SignalP and other specialized programs. The variant protein is believed to be located intracellularly with regard to the cell. The protein localization is believed to be intracellularly because neither of the trans-membrane region prediction programs predicted a trans-membrane region for this protein. In addition both signal-peptide prediction programs predict that this protein is a non-secreted protein.

[0881] Variant protein AA583399_PEA_{—}1_P12 (SEQ ID NO: 85) is encoded by the following transcript(s): AA583399_PEA_{—}1_T10 (SEQ ID NO: 47) and AA583399_PEA_{—}1_T11 (SEQ ID NO: 48), for which the coding portion starts at position 191 and ends at position 367. The transcript also has the following SNPs as listed in Table 43 (given according to their position on the nucleotide sequence, with the alternative nucleic acid listed).

TABLE 43
Nucleic acid SNPs

| | SNP position on nucleotide |
|---|---|
| Polymorphism | sequence |
| A -> G | 380 |

[0882] The coding portion of transcript AA583399_PEA_{—}1_T11 (SEQ ID NO: 48) starts at position 191 and ends at position 367. The transcript also has the following SNPs as listed in Table 44 (given according to their position on the nucleotide sequence, with the alternative nucleic acid listed).

TABLE 44
Nucleic acid SNPs

| | SNP position on nucleotide |
|---|---|
| Polymorphism | sequence |
| A -> G | 380 |

[0883] Variant protein AA583399_PEA_{—}1_P14 (SEQ ID NO: 86) according to the present invention has an amino acid sequence as given in the “Sequence Listing” of the application; it is encoded by transcript(s) AA583399_PEA_{—}1_T15 (SEQ ID NO: 50). The location of the variant protein was determined according to results from a number of different software programs and analyses, including analyses from SignalP and other specialized programs. The variant protein is believed to be located intracellularly with regard to the cell. The protein localization is believed to be intracellularly because neither of the trans-membrane region prediction programs predicted a trans-membrane region for this protein. In addition both signal-peptide prediction programs predict that this protein is a non-secreted protein.

[0884] Variant protein AA583399_PEA_{—}1_P14 (SEQ ID NO: 86) is encoded by the following transcript(s): AA583399_PEA_{—}1_T15 (SEQ ID NO: 50), for which the coding portion starts at position 43 and ends at position 210.

[0885] As noted above, cluster AA583399 features 20 segment(s), which were listed in Table 23 above and for which the sequence(s) are given in the “Sequence Listing” of the application. These segment(s) are portions of nucleic acid sequence(s) which are described herein separately because they are of particular interest. A description of some of the segments according to the present invention is now provided.

[0886] Segment cluster AA583399_PEA_{—}1_node_{—}0 (SEQ ID NO: 53) according to the present invention is supported by 24 libraries. The number of libraries was determined as previously described. This segment can be found in the following transcript(s): AA583399_PEA_{—}1_T0 (SEQ ID NO: 37), AA583399_PEA_{—}1_T1 (SEQ ID NO: 38), AA583399_PEA 11T2 (SEQ ID NO: 39), AA583399_PEA_{—}1_T3 (SEQ ID NO: 40), AA583399_PEA_{—}1_T4 (SEQ ID NO: 41), AA583399_PEA_{—}11T5 (SEQ ID NO: 42), AA583399_PEA_{—}1_T6 (SEQ ID NO: 43), AA583399_PEA_{—}1_T7 (SEQ ID NO: 44), AA583399_PEA 11T8 (SEQ ID NO: 45), AA583399_PEA_{—}1T9 (SEQ ID NO: 46), AA583399_PEA_{—}1_T10 (SEQ ID NO: 47), AA583399_PEA_{—}1_T1 (SEQ ID NO: 48) and AA583399_PEA_{—}1-T17 (SEQ ID NO: 52). Table 45 below describes the starting and ending position of this segment on each transcript.

TABLE 45
Segment location on transcripts

| | Segment | Segment |
|---|---|---|
| | starting | ending |
| Transcript name | position | position |
| AA583399_PEA_1_T0 (SEQ ID NO: 37) | 1 | 355 |
| AA583399_PEA_1_T1 (SEQ ID NO: 38) | 1 | 355 |
| AA583399_PEA_1_T2 (SEQ ID NO: 39) | 1 | 355 |
| AA583399_PEA_1_T3 (SEQ ID NO: 40) | 1 | 355 |
| AA583399_PEA_1_T4 (SEQ ID NO: 41) | 1 | 355 |
| AA583399_PEA_1_T5 (SEQ ID NO: 42) | 1 | 355 |
| AA583399_PEA_1_T6 (SEQ ID NO: 43) | 1 | 355 |
| AA583399_PEA_1_T7 (SEQ ID NO: 44) | 1 | 355 |
| AA583399_PEA_1_T8 (SEQ ID NO: 45) | 1 | 355 |
| AA583399_PEA_1_T9 (SEQ ID NO: 46) | 1 | 355 |
| AA583399_PEA_1_T10 (SEQ ID NO: 47) | 1 | 355 |
| AA583399_PEA_1_T11 (SEQ ID NO: 48) | 1 | 355 |
| AA583399_PEA_1_T17 (SEQ ID NO: 52) | 1 | 355 |

[0887] Segment cluster AA583399_PEA_{—}1_node_{—}3 (SEQ ID NO: 54) according to the present invention is supported by 4 libraries. The number of libraries was determined as previously described. This segment can be found in the following transcript(s): AA583399_PEA_{—}1_T4 (SEQ ID NO: 41). Table 46 below describes the starting and ending position of this segment on each transcript.

TABLE 46
Segment location on transcripts

| | Segment | |
|---|---|---|
| | starting | Segment |
| Transcript name | position | ending position |
| AA583399_PEA_1_T4 (SEQ ID NO: 41) | 465 | 1120 |

[0888] Segment cluster AA583399_PEA_{—}1_node_{—}9 (SEQ ID NO: 55) according to the present invention is supported by 23 libraries. The number of libraries was determined as previously described. This segment can be found in the following transcript(s): AA583399_PEA_{—}1T0 (SEQ ID NO: 37), AA583399_PEA_{—}1_T1 (SEQ ID NO: 38), AA583399_PEA_{—}1_T2 (SEQ ID NO: 39), AA583399_PEA_{—}1_T3 (SEQ ID NO: 40), AA583399_PEA_{—}1_T4 (SEQ ID NO: 41), AA583399_PEA_{—}1_T5 (SEQ ID NO: 42), AA583399_PEA_{—}1_T6 (SEQ ID NO: 43), AA583399_PEA_{—}1T8 (SEQ ID NO: 45) and AA583399_PEA_{—}1_T9 (SEQ ID NO: 46). Table 47 below describes the starting and ending position of this segment on each transcript.

TABLE 47
Segment location on transcripts

| | Segment | |
|---|---|---|
| | starting | Segment |
| Transcript name | position | ending position |
| AA583399_PEA_1_T0 (SEQ ID NO: 37) | 872 | 1131 |
| AA583399_PEA_1_T1 (SEQ ID NO: 38) | 776 | 1035 |
| AA583399_PEA_1_T2 (SEQ ID NO: 39) | 682 | 941 |
| AA583399_PEA_1_T3 (SEQ ID NO: 40) | 704 | 963 |
| AA583399_PEA_1_T4 (SEQ ID NO: 41) | 1528 | 1787 |
| AA583399_PEA_1_T5 (SEQ ID NO: 42) | 778 | 1037 |
| AA583399_PEA_1_T6 (SEQ ID NO: 43) | 776 | 1035 |
| AA583399_PEA_1_T8 (SEQ ID NO: 45) | 465 | 724 |
| AA583399_PEA_1_T9 (SEQ ID NO: 46) | 776 | 1035 |

[0889] Segment cluster AA583399_PEA_{—}1_node_{—}10 (SEQ ID NO: 56) according to the present invention is supported by 59 libraries. The number of libraries was determined as previously described. This segment can be found in the following transcript(s): AA583399_PEA_{—}1_T0 (SEQ ID NO: 37), AA583399_PEA_{—}1_T1 (SEQ ID NO: 38), AA583399_PEA_{—}1_T2 (SEQ ID NO: 39), AA583399_PEA_{—}1_T3 (SEQ ID NO: 40), AA583399_PEA_{—}1_T4 (SEQ ID NO: 41), AA583399_PEA_{—}1_T5 (SEQ ID NO: 42), AA583399_PEA_{—}1_T6 (SEQ ID NO: 43), AA583399_PEA_{—}1_T7 (SEQ ID NO: 44), AA583399_PEA_{—}1_T8 (SEQ ID NO: 45) and AA583399_PEA_{—}1_T9 (SEQ ID NO: 46). Table 48 below describes the starting and ending position of this segment on each transcript.

TABLE 48
Segment location on transcripts

| | Segment | Segment |
|---|---|---|
| | starting | ending |
| Transcript name | position | position |
| AA583399_PEA_1_T0 (SEQ ID NO: 37) | 1132 | 2389 |
| AA583399_PEA_1_T1 (SEQ ID NO: 38) | 1036 | 2293 |
| AA583399_PEA_1_T2 (SEQ ID NO: 39) | 942 | 2199 |
| AA583399_PEA_1_T3 (SEQ ID NO: 40) | 964 | 2221 |
| AA583399_PEA_1_T4 (SEQ ID NO: 41) | 1788 | 3045 |
| AA583399_PEA_1_T5 (SEQ ID NO: 42) | 1038 | 2295 |
| AA583399_PEA_1_T6 (SEQ ID NO: 43) | 1036 | 2293 |
| AA583399_PEA_1_T7 (SEQ ID NO: 44) | 872 | 2129 |
| AA583399_PEA_1_T8 (SEQ ID NO: 45) | 725 | 1982 |
| AA583399_PEA_1_T9 (SEQ ID NO: 46) | 1036 | 2293 |

[0890] Segment cluster AA583399_PEA_{—}1_node_{—}14 (SEQ ID NO: 58) according to the present invention is supported by 6 libraries. The number of libraries was determined as previously described. This segment can be found in the following transcript(s): AA583399_PEA_{—}1_T12 (SEQ ID NO: 49) and AA583399_PEA_{—}1_T16 (SEQ ID NO: 51). Table 49 below describes the starting and ending position of this segment on each transcript.

TABLE 49
Segment location on transcripts

| | Segment | Segment |
|---|---|---|
| | starting | ending |
| Transcript name | position | position |
| AA583399_PEA_1_T12 (SEQ ID NO: 49) | 1 | 1179 |
| AA583399_PEA_1_T16 (SEQ ID NO: 51) | 1 | 1179 |

[0891] Segment cluster AA583399_PEA_{—}1_node_{—}21 (SEQ ID NO: 59) according to the present invention is supported by 15 libraries. The number of libraries was determined as previously described. This segment can be found in the following transcript(s): AA583399_PEA_{—}1_T10 (SEQ ID NO: 47), AA583399_PEA_{—}1_T11 (SEQ ID NO: 48), AA583399_PEA_{—}1_T12 (SEQ ID NO: 49), AA583399_PEA_{—}1_T15 (SEQ ID NO: 50), AA583399_PEA_{—}1_T16 (SEQ ID NO: 51) and AA583399_PEA_{—}1_T17 (SEQ ID NO: 52). Table 50 below describes the starting and ending position of this segment on each transcript.

TABLE 50
Segment location on transcripts

| | Segment | Segment |
|---|---|---|
| | starting | ending |
| Transcript name | position | position |
| AA583399_PEA_1_T10 (SEQ ID NO: 47) | 465 | 633 |
| AA583399_PEA_1_T11 (SEQ ID NO: 48) | 465 | 633 |
| AA583399_PEA_1_T12 (SEQ ID NO: 49) | 1180 | 1348 |
| AA583399_PEA_1_T15 (SEQ ID NO: 50) | 78 | 246 |
| AA583399_PEA_1_T16 (SEQ ID NO: 51) | 1180 | 1348 |
| AA583399_PEA_1_T17 (SEQ ID NO: 52) | 434 | 602 |

[0892] Segment cluster AA583399_PEA_{—}1_node_{—}24 (SEQ ID NO: 60) according to the present invention is supported by 7 libraries. The number of libraries was determined as previously described. This segment can be found in the following transcript(s): AA583399_PEA_{—}11T111 (SEQ ID NO: 48), AA583399_PEA_{—}1_T12 (SEQ ID NO: 49), AA583399_PEA_{—}1T15 (SEQ ID NO: 50) and AA583399_PEA_{—}1_T16 (SEQ ID NO: 51). Table 51 below describes the starting and ending position of this segment on each transcript.

TABLE 51
Segment location on transcripts

| | Segment | Segment |
|---|---|---|
| | starting | ending |
| Transcript name | position | position |
| AA583399_PEA_1_T11 (SEQ ID NO: 48) | 634 | 757 |
| AA583399_PEA_1_T12 (SEQ ID NO: 49) | 1349 | 1472 |
| AA583399_PEA_1_T15 (SEQ ID NO: 50) | 247 | 370 |
| AA583399_PEA_1_T16 (SEQ ID NO: 51) | 1349 | 1472 |

[0893] Segment cluster AA583399_PEA_{—}1_node_{—}25 (SEQ ID NO: 61) according to the present invention is supported by 1 libraries. The number of libraries was determined as previously described. This segment can be found in the following transcript(s): AA583399_PEA_{—}1_T16 (SEQ ID NO: 51). Table 52 below describes the starting and ending position of this segment on each transcript.

TABLE 52
Segment location on transcripts

| | Segment | Segment |
|---|---|---|
| | starting | ending |
| Transcript name | position | position |
| AA583399_PEA_1_T16 (SEQ ID NO: 51) | 1473 | 1614 |

[0894] Segment cluster AA583399_PEA_{—}1_node_{—}29 (SEQ ID NO: 62) according to the present invention is supported by 8 libraries. The number of libraries was determined as previously described. This segment can be found in the following transcript(s): AA583399_PEA_{—}1_T11 (SEQ ID NO: 48), AA583399_PEA_{—}1T12 (SEQ ID NO: 49) and AA583399_PEA_{—}1_T15 (SEQ ID NO: 50). Table 53 below describes the starting and ending position of this segment on each transcript.

TABLE 53
Segment location on transcripts

| | Segment | Segment |
|---|---|---|
| | starting | ending |
| Transcript name | position | position |
| AA583399_PEA_1_T11 (SEQ ID NO: 48) | 832 | 1491 |
| AA583399_PEA_1_T12 (SEQ ID NO: 49) | 1547 | 2206 |
| AA583399_PEA_1_T15 (SEQ ID NO: 50) | 445 | 1104 |

[0895] According to an optional embodiment of the present invention, short segments related to the above cluster are also provided. These segments are up to about 120 bp in length, and so are included in a separate description.

[0896] Segment cluster AA583399_PEA_{—}1_node_{—}2 (SEQ ID NO: 64) according to the present invention is supported by 24 libraries. The number of libraries was determined as previously described. This segment can be found in the following transcript(s): AA583399_PEA_{—}1_T0 (SEQ ID NO: 37), AA583399_PEA_{—}1_T1 (SEQ ID NO: 38), AA583399_PEA_{—}1_T2 (SEQ ID NO: 39), AA583399_PEA_{—}1_T3 (SEQ ID NO: 40), AA583399_PEA_{—}1_T4 (SEQ ID NO: 41), AA583399_PEA_{—}11T5 (SEQ ID NO: 42), AA583399_PEA_{—}1_T6 (SEQ ID NO: 43), AA583399_PEA_{—}1T7 (SEQ ID NO: 44), AA583399_PEA_{—}1_T8 (SEQ ID NO: 45), A583399_PEA_{—}1T9 (SEQ ID NO: 46), AA583399_PEA_{—}1_T10 (SEQ ID NO: 47), AA583399_PEA_{—}1_T11 (SEQ ID NO: 48) and AA583399_PEA_{—}1_T17 (SEQ ID NO: 52). Table 54 below describes the starting and ending position of this segment on each transcript.

TABLE 54
Segment location on transcripts

| | Segment | Segment |
|---|---|---|
| | starting | ending |
| Transcript name | position | position |
| AA583399_PEA_1_T0 (SEQ ID NO: 37) | 387 | 464 |
| AA583399_PEA_1_T1 (SEQ ID NO: 38) | 387 | 464 |
| AA583399_PEA_1_T2 (SEQ ID NO: 39) | 387 | 464 |
| AA583399_PEA_1_T3 (SEQ ID NO: 40) | 387 | 464 |
| AA583399_PEA_1_T4 (SEQ ID NO: 41) | 387 | 464 |
| AA583399_PEA_1_T5 (SEQ ID NO: 42) | 387 | 464 |
| AA583399_PEA_1_T6 (SEQ ID NO: 43) | 387 | 464 |
| AA583399_PEA_1_T7 (SEQ ID NO: 44) | 387 | 464 |
| AA583399_PEA_1_T8 (SEQ ID NO: 45) | 387 | 464 |
| AA583399_PEA_1_T9 (SEQ ID NO: 46) | 387 | 464 |
| AA583399_PEA_1_T10 (SEQ ID NO: 47) | 387 | 464 |
| AA583399_PEA_1_T11 (SEQ ID NO: 48) | 387 | 464 |
| AA583399_PEA_1_T17 (SEQ ID NO: 52) | 356 | 433 |

[0897] Segment cluster AA583399_PEA_{—}1_node_{—}19 (SEQ ID NO: 71) according to the present invention is supported by 1 libraries. The number of libraries was determined as previously described. This segment can be found in the following transcript(s): AA583399_PEA_{—}1_T15 (SEQ ID NO: 50). Table 55 below describes the starting and ending position of this segment on each transcript.

TABLE 55
Segment location on transcripts

| | Segment | Segment |
|---|---|---|
| | starting | ending |
| Transcript name | position | position |
| AA583399_PEA_1_T15 (SEQ ID NO: 50) | 1 | 77 |

[0898] Segment cluster AA583399_PEA_{—}1_node_{—}27 (SEQ ID NO: 72) according to the present invention is supported by 4 libraries. The number of libraries was determined as previously described. This segment can be found in the following transcript(s): AA583399_PEA_{—}1_T11 (SEQ ID NO: 48), AA583399_PEA_{—}1_T12 (SEQ ID NO: 49) and AA583399_PEA_{—}1_T15 (SEQ ID NO: 50). Table 56 below describes the starting and ending position of this segment on each transcript.

TABLE 56
Segment location on transcripts

| | Segment | Segment |
|---|---|---|
| | starting | ending |
| Transcript name | position | position |
| AA583399_PEA_1_T11 (SEQ ID NO: 48) | 758 | 831 |
| AA583399_PEA_1_T12 (SEQ ID NO: 49) | 1473 | 1546 |
| AA583399_PEA_1_T15 (SEQ ID NO: 50) | 371 | 444 |

[0899] Expression of Homo sapiens myeloma overexpressed gene (in a subset of t(11;14) positive multiple myelomas) (MYEOV) transcripts detectable by or according to seg1-AA583399_seg1 (SEQ ID NO: 364) amplicon and primers AA583399_seg1F (SEQ ID NO: 362) and AA583399_seg1R (SEQ ID NO: 363); or MYEOV transcripts detectable by or according to seg17—AA583399_seg17 (SEQ ID NO: 367) amplicon and primers AA583399_seg17F (SEQ ID NO: 365) and AA583399_seg17R (SEQ ID NO: 366); or MYEOV transcripts detectable by or according to seg30-32—AA583399_seg30-32 (SEQ ID NO: 370) amplicon and primers AA583399_seg30-32F (SEQ ID NO: 368) and AA583399_seg30-32R (SEQ ID NO: 369) was measured by real time PCR.

[0900] The sequences of the corresponding primers and amplicons are given below.

[0901] The below table 57 gives a conversion between the terms for segments (nodes) in the experimental results and those listed earlier in the description for cluster AA583399:

TABLE 57

| | Segment name within the |
|---|---|
| Segment name for | description for cluster AA583399 |
| AA583399 in experimental results | report |
| seg 1 (WT) (SEQ ID NO: 364) | seg 0 |
| seg30-32 (SEQ ID NO: 370) | seg 27-29 |
| seg 17 (SEQ ID NO: 367) | seg 14 |

Forward Primer (AA583399_seg1F) (SEQ ID NO: 362):
GAATCAGCCCAAAGCCAGG
Reverse Primer (AA583399_seg1R) (SEQ ID NO: 363):
GCTGGTGAAAGCACTGGGTT
Amplicon (AA583399_seg1) (SEQ ID NO: 364):
GAATCAGCCCAAAGCCAGGCGTCCAGGGTCTCCCTCACCTGAAGCTGACT
TTTTCCCCACCTTGGACAGAGGGCGGGAGATGCCATCCCCACTGAACCCA
GTGCTTTCACCAGC
Forward primer (AA583399_seg17F) (SEQ ID NO: 365):
CATTCTCCACGCATCAGATGA
Reverse primer (AA583399_seg17R (SEQ ID NO: 366)):
ACCATCAGATTGGCAGCATG
Amplicon (AA583399 seg17) (SEQ ID NO: 367):
CATTCTCCACGCATCAGATGATCCTGTGGCCCCTCAGTGCCAGGCCCCAC
TGGCCCTCTGCGCACATCAGTGACTCTGATGTTCTCCCCCACCGCATGCT
GCCAATCTGATGGT
Forward Primer (AA583399_seg30-32F)
(SEQ ID NO: 368):
TGGAGATTCCTGGTTTAAAGCATT
Reverse Primer (AA583399_seg30-32R)
(SEQ ID NO: 369):
CCCCAGCTTAGAGCTGCACT
Amplicon (AA583399_seg30-32) (SEQ ID NO: 370):
TGGAGATTCCTGGTTTAAAGCATTTAAAGCCTCTGTGAAAATTTGCCCAG
GCCAACAACTTCACTTTCCACACTCAGTGCCACGAAGTGCAGCTCTAAGC
TGGGG

Expression of Homo sapiens Myeloma Overexpressed Gene (in a Subset of t(11;14) Positive Multiple Myelomas) (MYEOV) AA583399 Transcripts which are Detectable by Amplicon as Depicted in Sequence Name AA583399_Seg1 (SEQ ID NO: 364) in Normal and Cancerous Lung Tissues

[0902] Expression of Homo sapiens myeloma overexpressed gene (in a subset of t(11;14) positive multiple myelomas) (MYEOV) transcripts detectable by or according to seg1-AA583399_seg1 (SEQ ID NO: 364) amplicon and primers AA583399_seg1F (SEQ ID NO: 362) and AA583399_seg1R (SEQ ID NO: 363) was measured by real time PCR. In parallel the expression of four housekeeping genes—HPRT1 (GenBank Accession No. NM_{—}000194 (SEQ ID NO:337); amplicon—HPRT1-amplicon (SEQ ID NO: 305) (SEQ ID NO: 305)), PBGD (GenBank Accession No. BC019323 (SEQ ID NO:336); amplicon—PBGD-amplicon (SEQ ID NO: 302)), SDHA (GenBank Accession No. NM_{—}004168 (SEQ ID NO:335); amplicon—SDHA-amplicon (SEQ ID NO:299)) and Ubiquitin (GenBank Accession No. BC000449 (SEQ ID NO:341); amplicon—Ubiquitin-amplicon (SEQ ID NO: 317)) was measured similarly. For each RT sample, the expression of the above amplicon was normalized to the geometric mean of the quantities of the housekeeping genes. The normalized quantity of each RT sample was then divided by the median of the quantities of the normal post-mortem (PM) samples (sample numbers 47, 48, 49, 50, 90, 91, 92, 93, 96, 97, 98 and 99, Table 1_{—}2 above), to obtain a value of fold up-regulation for each sample relative to the median of the normal PM samples.

[0903] FIG. 12A is a histogram showing over expression of the Homo sapiens myeloma overexpressed gene (in a subset of t(11;14) positive multiple myelomas) (MYEOV) transcripts in cancerous Lung samples relative to the normal samples for transcripts detectable by or according to AA583399_seg1 (SEQ ID NO: 364).

[0904] As is evident from FIG. 12A, the expression of Homo sapiens myeloma overexpressed gene (in a subset of t(11;14) positive multiple myelomas) (MYEOV) transcripts detectable by the above amplicon in adenocarcinoma, squamous cell carcinoma, large cell carcinoma samples was significantly higher than in the non-cancerous samples (sample numbers 47, 48, 49, 50, 90, 91, 92, 93, 96, 97, 98 and 99, Table 1_{—}2 above). Notably an over-expression of at least 5 fold was found in 21 out of 35 non-small cell carcinoma samples, specifically in 8 out of 15 adenocarcinoma samples, 10 out of 16 squamous cell carcinoma samples, 3 out of 4 large cell carcinoma samples.

[0905] Statistical analysis was applied to verify the significance of these results, as described below.

[0906] Threshold of 5 fold over expression was found to differentiate between non-small cell carcinoma and normal samples with P value of 1.85e-004 as checked by exact Fisher test. Threshold of 5 fold over expression was found to differentiate between adenocarcinoma and normal samples with P value of 2.90e-003 as checked by exact Fisher test. Threshold of 5 fold over expression was found to differentiate between squamous cell carcinoma and normal samples with P value of 6.10e-004 as checked by exact Fisher test. Threshold of 5 fold over expression was found to differentiate between large cell carcinoma and normal samples with P value of 7.14e-003 as checked by exact Fisher test.

[0907] The above values demonstrate statistical significance of the results.

[0908] Primer pairs are also optionally and preferably encompassed within the present invention; for example, for the above experiment, the following primer pair was used as a non-limiting illustrative example only of a suitable primer pair: AA583399_seg1F (SEQ ID NO: 362) forward primer; and AA583399_seg1R (SEQ ID NO: 363) reverse primer.

[0909] The present invention also preferably encompasses any amplicon obtained through the use of any suitable primer pair; for example, for the above experiment, the following amplicon was obtained as a non-limiting illustrative example only of a suitable amplicon: AA583399_seg1 (SEQ ID NO: 364).

[0910] Expression of Homo sapiens myeloma overexpressed gene transcripts detectable by or according to seg1—AA583399_seg1WT (SEQ ID NO: 364) amplicon and primers AA583399_seg1WTF (SEQ ID NO: 362) and AA583399_seg1WTR (SEQ ID NO: 363) was further measured by real time PCR using enlarged panel as shown in Table 1_{—}6. In parallel the expression of four housekeeping genes—HPRT1 (GenBank Accession No. NM_{—}000194 (SEQ ID NO:337); amplicon—HPRT1-amplicon (SEQ ID NO: 305)), PBGD (GenBank Accession No. BC019323 (SEQ ID NO:336); amplicon—PBGD-amplicon (SEQ ID NO: 302)), SDHA (GenBank Accession No. NM_{—}004168 (SEQ ID NO:335); amplicon—SDHA-amplicon (SEQ ID NO:299)) and Ubiquitin (GenBank Accession No. BC000449 (SEQ ID NO:341); amplicon—Ubiquitin-amplicon (SEQ ID NO: 317)) was measured similarly. For each RT sample, the expression of the above amplicon was normalized to the normalization factor calculated from the expression of these house keeping genes as described in normalization method 2 in the “materials and methods” section. The normalized quantity of each RT sample was then divided by the median of the quantities of the normal samples (sample numbers 51, 52, 53, 54, 55, 56, 57, 58, 59, 60, 61, 62, 63, 64, 69 and 70, Table 1_{—}6 above), to obtain a value of fold up-regulation for each sample relative to the median of the normal samples.

[0911] FIG. 12B is a histogram showing over expression of the above-indicated Homo sapiens myeloma overexpressed gene transcripts in cancerous Lung samples relative to the normal samples.

[0912] As is evident from FIG. 12B, the expression of Homo sapiens myeloma overexpressed gene transcripts detectable by the above amplicon in non-small cell carcinoma samples—adenocarcinoma, squamous cell carcinoma, large cell carcinoma was significantly higher than in the non-cancerous samples (sample numbers 51, 52, 53, 54, 55, 56, 57, 58, 59, 60, 61, 62, 63, 64, 69 and 70, Table 1_{—}6 above). Notably an over-expression of at least 5 fold was found in 37 out of 57 non-small cell carcinoma samples, specifically in 16 out of 23 adenocarcinoma samples, in 14 out of 24 squamous cell carcinoma samples and in 7 out of 10 large cell carcinoma samples.

[0913] Statistical analysis was applied to verify the significance of these results, as described below.

[0914] The P value for the difference in the expression levels of Homo sapiens myeloma overexpressed gene transcripts detectable by the above amplicon in Lung non-small cell carcinoma samples versus the normal tissue samples was determined by T test as 9.50e-005. Lung adenocarcinoma samples versus the normal tissue samples was determined by T test as 6.40e-003. The P value for the difference in the expression levels of Homo sapiens myeloma overexpressed gene transcripts detectable by the above amplicon in Lung adenocarcinoma samples, in Lung squamous cell carcinoma samples and lung large cell carcinoma versus the normal tissue samples was determined by T test as 6.40e-003, 8.58e-003 and 1.16e-001, respectively.

[0915] Threshold of 5 fold over expression was found to differentiate between non-small cell carcinoma and normal samples with P value of 1.39e-006 as checked by exact Fisher test. Threshold of 5 fold over expression was found to differentiate between adenocarcinoma, squamous cell carcinoma and large cell carcinoma and normal samples with P value of 6.50e-006, 8.45e-005 and 1.82e-004, respectively as checked by exact Fisher test.

[0916] The above values demonstrate statistical significance of the results.

[0917] Primer pairs are also optionally and preferably encompassed within the present invention; for example, for the above experiment, the following primer pair was used as a non-limiting illustrative example only of a suitable primer pair: AA583399_seg1WTF (SEQ ID NO: 362) forward primer; and AA583399_seg1WTR (SEQ ID NO: 363) reverse primer.

[0918] The present invention also preferably encompasses any amplicon obtained through the use of any suitable primer pair; for example, for the above experiment, the following amplicon was obtained as a non-limiting illustrative example only of a suitable amplicon: AA583399_seglWT (SEQ ID NO: 364).

Expression of Homo sapiens Myeloma Overexpressed Gene (in a Subset of t(11;14) Positive Multiple Myelomas) (MYEOV) AA583399 Transcripts which are Detectable by Amplicon as Depicted in Sequence Name AA583399_seg1 (SEQ ID NO: 364) in Normal and Cancerous Ovary Tissues

[0919] Expression of Homo sapiens myeloma overexpressed gene (in a subset of t(11;14) positive multiple myelomas) (MYEOV) transcripts detectable by or according to seg1—AA583399_seg1 (SEQ ID NO: 364) amplicon and primers AA583399_seg1F (SEQ ID NO: 362) and AA583399_seg1R (SEQ ID NO: 363) was measured by real time PCR. In parallel the expression of four housekeeping genes—SDHA (GenBank Accession No. NM_{—}004168 (SEQ ID NO:335); amplicon—SDHA-amplicon (SEQ ID NO:299)), HPRT1 (GenBank Accession No. NM_{—}000194 (SEQ ID NO:337); amplicon—HPRT1-amplicon (SEQ ID NO: 305)), PBGD (GenBank Accession No. BC019323 (SEQ ID NO:336); amplicon—PBGD-amplicon (SEQ ID NO: 302)) and GAPDH (GenBank Accession No. BC026907 (SEQ ID NO:338); GAPDH amplicon (SEQ ID NO: 308)) was measured similarly. For each RT sample, the expression of the above amplicon was normalized to the geometric mean of the quantities of the housekeeping genes. The normalized quantity of each RT sample was then divided by the median of the quantities of the normal post-mortem (PM) samples (sample numbers 45, 46, 71 and 48, Table 1_{—}1 above), to obtain a value of fold up-regulation for each sample relative to the median of the normal PM samples.

[0920] FIG. 13 is a histogram showing over expression of the Homo sapiens myeloma overexpressed gene (in a subset of t(11;14) positive multiple myelomas) (MYEOV) transcripts in cancerous Ovary samples relative to the normal samples for transcripts detectable by or according to AA583399_seg1 (SEQ ID NO: 364).

[0921] As is evident from FIG. 13, the expression of Homo sapiens myeloma overexpressed gene (in a subset of t(11;14) positive multiple myelomas) (MYEOV) transcripts detectable by the above amplicon in adenocarcinoma samples was significantly higher than in the non-cancerous samples (sample numbers 45, 46, 71 and 48, Table 1_{—}1 above). Notably an over-expression of at least 5 fold was found in 26 out of 43 adenocarcinoma samples, specifically in 15 out of 30 serous carcinoma samples and in 5 out of 6 mucinous carcinoma samples.

[0922] Statistical analysis was applied to verify the significance of these results, as described below.

[0923] The P value for the difference in the expression levels of Homo sapiens myeloma overexpressed gene (in a subset of t(11;14) positive multiple myelomas) (MYEOV) transcripts detectable by the above amplicon in Ovary adenocarcinoma samples versus the normal tissue samples was determined by T test as 1.43e-002.

[0924] The P value for the difference in the expression levels of Homo sapiens myeloma overexpressed gene (in a subset of t(11;14) positive multiple myelomas) (MYEOV) transcripts detectable by the above amplicon in Ovary serous carcinoma samples versus the normal tissue samples was determined by T test as 3.42e-002. The P value for the difference in the expression levels of Homo sapiens myeloma overexpressed gene (in a subset of t(11;14) positive multiple myelomas) (MYEOV) transcripts detectable by the above amplicon in Ovary mucinous carcinoma samples versus the normal tissue samples was determined by T test as 2.82e-002.

[0925] Threshold of 5 fold over expression was found to differentiate between adenocarcinoma and normal samples with P value of 3.36e-002 as checked by exact Fisher test.

[0926] The above values demonstrate statistical significance of the results.

[0927] Primer pairs are also optionally and preferably encompassed within the present invention; for example, for the above experiment, the following primer pair was used as a non-limiting illustrative example only of a suitable primer pair: AA583399_seg1F (SEQ ID NO: 362) forward primer; and AA583399_seg1R (SEQ ID NO: 363) reverse primer.

[0928] The present invention also preferably encompasses any amplicon obtained through the use of any suitable primer pair; for example, for the above experiment, the following amplicon was obtained as a non-limiting illustrative example only of a suitable amplicon: AA583399_seg1 (SEQ ID NO: 364).

Expression of Homo sapiens Myeloma Overexpressed Gene (in a Subset of t(11;14) Positive Multiple Myelomas) (MYEOV) AA583399 Transcripts which are Detectable by Amplicon as Depicted in Sequence Name AA583399_seg1 (SEQ ID NO: 364) in Different Normal Tissues

[0929] Expression of Homo sapiens myeloma overexpressed gene (in a subset of t(11;14) positive multiple myelomas) (MYEOV) transcripts detectable by or according to seg1—AA583399_seg1 (SEQ ID NO: 364) amplicon and primers AA583399_seg1F (SEQ ID NO: 362) and AA583399_seg1R (SEQ ID NO: 363) was measured by real time PCR. In parallel the expression of four housekeeping genes—SDHA (GenBank Accession No. NM_{—}004168 (SEQ ID NO:335); amplicon—SDHA-amplicon (SEQ ID NO:299)), Ubiquitin (GenBank Accession No. BC000449 (SEQ ID NO:341); amplicon—Ubiquitin-amplicon (SEQ ID NO: 317)), RPL19 (GenBank Accession No. NM_{—}000981 (SEQ ID NO:342); RPL19 amplicon (SEQ ID NO: 320)) and TATA box (GenBank Accession No. NM_{—}003194 (SEQ ID NO:343); TATA amplicon (SEQ ID NO: 323)) was measured similarly. For each RT sample, the expression of the above amplicon was normalized to the geometric mean of the quantities of the housekeeping genes. The normalized quantity of each RT sample was then divided by the median of the quantities of the colon samples (sample numbers 1, 2 and 3, Table 1_{—}9 above), to obtain a value of relative expression of each sample relative to the median of the colon samples. FIG. 14A shows the result of expression of Homo sapiens myeloma overexpressed gene (in a subset of t(11;14) positive multiple myelomas) (MYEOV) AA583399 transcripts which are detectable by amplicon as depicted in sequence name AA583399_seg1 (SEQ ID NO: 364) in different normal tissues.

[0930] Expression of Homo sapiens myeloma overexpressed gene transcripts detectable by or according to seg1WT—AA583399_seg1WT (SEQ ID NO: 364) amplicon and primers AA583399_seg1WTF (SEQ ID NO: 362) and AA583399_seg1WTR (SEQ ID NO: 363) was further measured by real time PCR using updated panel, as shown in Table 1_{—}10. In parallel the expression of four housekeeping genes—SDHA (GenBank Accession No. NM_{—}004168 (SEQ ID NO:335); amplicon—SDHA-amplicon (SEQ ID NO:299)), Ubiquitin (GenBank Accession No. BC000449 (SEQ ID NO:341); amplicon—Ubiquitin-amplicon (SEQ ID NO: 317)), RPL19 (GenBank Accession No. NM_{—}000981 (SEQ ID NO:342); RPL19 amplicon (SEQ ID NO: 320)) and TATA box (GenBank Accession No. NM_{—}003194 (SEQ ID NO:343); TATA amplicon (SEQ ID NO: 323)) was measured similarly. For each RT sample, the expression of the above amplicon was normalized to the normalization factor calculated from the expression of these house keeping genes as described in normalization method 2 in the “materials and methods” section. The normalized quantity of each RT sample was then divided by the median of the quantities of the colon samples (sample numbers 3, 4 and 5, Table 1_{—}10 above), to obtain a value of relative expression of each sample relative to the median of the colon samples, as shown in FIG. 14B. The normalized quantity of each RT sample was then divided by the median of the quantities of the lung samples (sample numbers 26, 28, 29 and 30, Table 1_{—}10 above), to obtain a value of relative expression of each sample relative to the median of the lung samples, as shown in FIG. 14C.

Expression of Homo sapiens Myeloma Overexpressed Gene (in a Subset of t(11;14) Positive Multiple Myelomas) (MYEOV) AA583399 Transcripts which are Detectable by Amplicon as Depicted in Sequence Name AA583399 seg17 (SEQ ID NO: 367) in Normal and Cancerous Lung Tissues

[0931] Expression of Homo sapiens myeloma overexpressed gene (in a subset of t(11;14) positive multiple myelomas) (MYEOV) transcripts detectable by or according to seg17—AA583399 seg17 (SEQ ID NO: 367) amplicon and primers AA583399 seg17F (SEQ ID NO: 365) and AA583399 seg17R (SEQ ID NO: 366) was measured by real time PCR. In parallel the expression of four housekeeping genes—PB3GD (GenBank Accession No. BC019323 (SEQ ID NO:336); amplicon—PBGD-amplicon (SEQ ID NO: 302)), HPRT1 (GenBank Accession No. NM_{—}000194 (SEQ ID NO:337); amplicon—HPRT1-amplicon (SEQ ID NO: 305) (SEQ ID NO: 305)), Ubiquitin (GenBank Accession No. BC000449 (SEQ ID NO:341); amplicon—Ubiquitin-amplicon (SEQ ID NO: 317)) and SDHA (GenBank Accession No. NM_{—}004168 (SEQ ID NO:335); amplicon—SDHA-amplicon (SEQ ID NO:299)) was measured similarly. For each RT sample, the expression of the above amplicon was normalized to the geometric mean of the quantities of the housekeeping genes. The normalized quantity of each RT sample was then divided by the median of the quantities of the normal post-mortem (PM) samples (Sample Nos. 47-50, 90-93, 96-99, Table 1_{—}2, above), to obtain a value of fold up-regulation for each sample relative to the median of the normal PM samples.

[0932] FIG. 15A is a histogram showing over expression of the Homo sapiens myeloma overexpressed gene (in a subset of t(11;14) positive multiple myelomas) (MYEOV) transcripts detectable by or according to AA583399 seg17 (SEQ ID NO: 367) in cancerous lung samples relative to the normal samples.

[0933] As is evident from FIG. 15A, the expression of Homo sapiens myeloma overexpressed gene (in a subset of t(11;14) positive multiple myelomas) (MYEOV) transcripts detectable by the above amplicon in cancer samples was significantly higher than in the non-cancerous samples (Sample Nos. 46-50, 90-93, 96-99 Table 1-2). Notably an over-expression of at least 10 fold was found in 5 out of 15 adenocarcinoma samples, 8 out of 16 squamous cell carcinoma samples.

[0934] Statistical analysis was applied to verify the significance of these results, as described below.

[0935] The P value for the difference in the expression levels of Homo sapiens myeloma overexpressed gene (in a subset of t(11;14) positive multiple myelomas) (MYEOV) transcripts detectable by the above amplicon in Lung adenocarcinoma samples versus the normal tissue samples was determined by T test as 6.15E-02.

[0936] The P value for the difference in the expression levels of Homo sapiens myeloma overexpressed gene (in a subset of t(11;14) positive multiple myelomas) (MYEOV) transcripts detectable by the above amplicon in Lung squamous cell carcinoma samples versus the normal tissue samples was determined by T test as 4.4E-02.

[0937] The P value for the difference in the expression levels of Homo sapiens myeloma overexpressed gene (in a subset of t(11;14) positive multiple myelomas) (MYEOV) transcripts detectable by the above amplicon in all Lung Non-small cells carcinoma samples versus the normal tissue samples was determined by T test as 4.22E-03.

[0938] Threshold of 10 fold overexpression was found to differentiate between all Lung Non-small cell carcinoma and normal samples with P value of 3.63E-02 as checked by exact fisher test. The above values demonstrate statistical significance of the results.

[0939] Primer pairs are also optionally and preferably encompassed within the present invention; for example, for the above experiment, the following primer pair was used as a non-limiting illustrative example only of a suitable primer pair: AA583399 seg17F (SEQ ID NO: 365) forward primer; and AA583399 seg17R (SEQ ID NO: 366) reverse primer.

[0940] The present invention also preferably encompasses any amplicon obtained through the use of any suitable primer pair; for example, for the above experiment, the following amplicon was obtained as a non-limiting illustrative example only of a suitable amplicon: AA583399 seg17 (SEQ ID NO: 367).

[0941] Expression of Homo sapiens myeloma overexpressed gene (in a subset of t(11;14) positive multiple myelomas) (MYEOV) transcripts detectable by or according to seg17—AA583399_seg17 (SEQ ID NO: 367) amplicon and primers AA583399_seg17F (SEQ ID NO: 365) and AA583399_seg17R (SEQ ID NO: 366) was further measured by real time PCR using enlarged panel as shown in Table 1_{—}6. In parallel the expression of four housekeeping genes—HPRT1 (GenBank Accession No. NM_{—}000194 (SEQ ID NO:337); amplicon—HPRT1-amplicon (SEQ ID NO: 305) (SEQ ID NO: 305)), PBGD (GenBank Accession No. BC019323 (SEQ ID NO:336); amplicon—PBGD-amplicon (SEQ ID NO: 302)), SDHA (GenBank Accession No. NM_{—}004168 (SEQ ID NO:335); amplicon—SDHA-amplicon (SEQ ID NO:299)) and Ubiquitin (GenBank Accession No. BC000449 (SEQ ID NO:341); amplicon—Ubiquitin-amplicon (SEQ ID NO: 317)) was measured similarly. For each RT sample, the expression of the above amplicon was normalized to the normalization factor calculated from the expression of these house keeping genes as described in normalization method 2 in the “materials and methods” section. The normalized quantity of each RT sample was then divided by the median of the quantities of the normal samples (sample numbers 51, 52, 53, 54, 55, 56, 57, 58, 59, 60, 61, 62, 63, 64, 69 and 70, Table 1_{—}6 above), to obtain a value of fold up-regulation for each sample relative to the median of the normal samples.

[0942] FIG. 15B is a histogram showing over expression of the above-indicated Homo sapiens myeloma overexpressed gene (in a subset of t(11;14) positive multiple myelomas) (MYEOV) transcripts in cancerous Lung samples relative to the normal samples.

[0943] As is evident from FIG. 15B, the expression of Homo sapiens myeloma overexpressed gene (in a subset of t(11;14) positive multiple myelomas) (MYEOV) transcripts detectable by the above amplicon in non-small cell carcinoma samples was significantly higher than in the non-cancerous samples (sample numbers 51, 52, 53, 54, 55, 56, 57, 58, 59, 60, 61, 62, 63, 64, 69 and 70, Table 1_{—}6 above). Notably an over-expression of at least 5 fold was found in 30 out of 57 non-small cell carcinoma samples. In 14 out of 23 adenocarcinoma samples, in 10 out of 24 squamous cell carcinoma samples and in 6 out of 10 large cell carcinoma samples.

[0944] Statistical analysis was applied to verify the significance of these results, as described below.

[0945] The P value for the difference in the expression levels of Homo sapiens myeloma overexpressed gene (in a subset of t(11;14) positive multiple myelomas) (MYEOV) transcripts detectable by the above amplicon in Lung non-small cell carcinoma samples versus the normal tissue samples was determined by T test as 5.02e-005. The P value for the difference in the expression levels of Homo sapiens myeloma overexpressed gene (in a subset of t(11;14) positive multiple myelomas) (MYEOV) transcripts detectable by the above amplicon in Lung adenocarcinoma samples, Lung squamous cell carcinoma samples and lung large cell carcinoma versus the normal tissue samples was determined by T test as 8.52e-003, 9.45e-003 and 9.18e-002 respectively.

[0946] Threshold of 5 fold over expression was found to differentiate between non-small cell carcinoma and normal samples with P value of 5.03e-005 as checked by exact Fisher test. Threshold of 5 fold over expression was found to differentiate between adenocarcinoma, squamous cell carcinoma and large cell carcinoma and normal samples with P value of 5.42e-005, 2.31e-003 and 9.12e-004 respectively as checked by exact Fisher test.

[0947] The above values demonstrate statistical significance of the results.

[0948] Primer pairs are also optionally and preferably encompassed within the present invention; for example, for the above experiment, the following primer pair was used as a non-limiting illustrative example only of a suitable primer pair: AA583399_seg17F (SEQ ID NO: 365) forward primer; and AA583399_seg17R (SEQ ID NO: 366) reverse primer.

[0949] The present invention also preferably encompasses any amplicon obtained through the use of any suitable primer pair; for example, for the above experiment, the following amplicon was obtained as a non-limiting illustrative example only of a suitable amplicon: AA583399_seg17 (SEQ ID NO: 367).

Expression of Homo sapiens Myeloma Overexpressed Gene (in a Subset of t(11;14) Positive Multiple Myelomas) (MYEOV) AA583399 Transcripts which are Detectable by Amplicon as Depicted in Sequence Name AA583399_seg17 (SEQ ID NO: 367) in Normal and Cancerous Ovary Tissues

[0950] Expression of Homo sapiens myeloma overexpressed gene (in a subset of t(11;14) positive multiple myelomas) (MYEOV) transcripts detectable by or according to seg17—AA583399_seg17 (SEQ ID NO: 367) amplicon and primers AA583399_seg17F (SEQ ID NO: 365) and AA583399_seg17R (SEQ ID NO: 366) was measured by real time PCR. In parallel the expression of four housekeeping genes—SDHA (GenBank Accession No. NM_{—}004168 (SEQ ID NO:335); amplicon—SDHA-amplicon (SEQ ID NO:299)), HPRT1 (GenBank Accession No. NM_{—}000194 (SEQ ID NO:337); amplicon—HPRT1-amplicon (SEQ ID NO: 305) (SEQ ID NO: 305)), PBGD (GenBank Accession No. BC019323 (SEQ ID NO:336); amplicon—PBGD-amplicon (SEQ ID NO: 302)) and GAPDH (GenBank Accession No. BC026907 (SEQ ID NO:338); GAPDH amplicon (SEQ ID NO: 308)) was measured similarly. For each RT sample, the expression of the above amplicon was normalized to the geometric mean of the quantities of the housekeeping genes. The normalized quantity of each RT sample was then divided by the median of the quantities of the normal post-mortem (PM) samples (sample numbers 45, 46 and 48, Table 1_{—}1 above), to obtain a value of fold up-regulation for each sample relative to the median of the normal PM samples.

[0951] FIG. 16A is a histogram showing over expression of the Homo sapiens myeloma overexpressed gene (in a subset of t(11;14) positive multiple myelomas) (MYEOV) transcripts detectable by or according to AA583399_seg17 (SEQ ID NO: 367) in cancerous ovary samples relative to the normal samples.

[0952] As is evident from FIG. 16A, the expression of Homo sapiens myeloma overexpressed gene (in a subset of t(11;14) positive multiple myelomas) (MYEOV) transcripts detectable by the above amplicon in adenocarcinoma samples was significantly higher than in the non-cancerous samples (sample numbers 45, 46 and 48, Table 1_{—}1 above). Notably an over-expression of at least 5 fold was found in 39 out of 43 adenocarcinoma samples, specifically in 26 out of 30 serous carcinoma samples and in 6 out of 6 mucinous carcinoma samples.

[0953] Statistical analysis was applied to verify the significance of these results, as described below.

[0954] The P value for the difference in the expression levels of Homo sapiens myeloma overexpressed gene (in a subset of t(11;14) positive multiple myelomas) (MYEOV) transcripts detectable by the above amplicon in Ovary adenocarcinoma samples versus the normal tissue samples was determined by T test as 2.31e-003.

[0955] The P value for the difference in the expression levels of Homo sapiens myeloma overexpressed gene (in a subset of t(11;14) positive multiple myelomas) (MYEOV) transcripts detectable by the above amplicon in Ovary serous carcinoma samples versus the normal tissue samples was determined by T test as 7.93e-003. Threshold of 5 fold over expression was found to differentiate between adenocarcinoma and normal samples with P value of 4.05e-002 as checked by exact Fisher test.

[0956] The above values demonstrate statistical significance of the results.

[0957] Primer pairs are also optionally and preferably encompassed within the present invention; for example, for the above experiment, the following primer pair was used as a non-limiting illustrative example only of a suitable primer pair: AA583399_seg17F (SEQ ID NO: 365) forward primer; and AA583399_seg17R (SEQ ID NO: 366) reverse primer.

[0958] The present invention also preferably encompasses any amplicon obtained through the use of any suitable primer pair; for example, for the above experiment, the following amplicon was obtained as a non-limiting illustrative example only of a suitable amplicon: AA583399_seg17 (SEQ ID NO: 367).

[0959] Expression of Homo sapiens myeloma overexpressed gene transcripts detectable by or according to seg17-AA583399_seg17 (SEQ ID NO: 367) amplicon and primers AA583399_seg17F (SEQ ID NO: 365) and AA583399_seg17R (SEQ ID NO: 366) was further measured by real time PCR using enlarged panel as shown in Table 1_{—}5. In parallel the expression of three housekeeping genes—SDHA (GenBank Accession No. NM_{—}004168 (SEQ ID NO:335); amplicon—SDHA-amplicon (SEQ ID NO:299)), HPRT1 (GenBank Accession No. NM_{—}000194 (SEQ ID NO:337); amplicon—HPRT1-amplicon (SEQ ID NO: 305) (SEQ ID NO: 305)) and G6PD (GenBank Accession No. NM_{—}000402 (SEQ ID NO:339); G6PD amplicon (SEQ ID NO: 311)) was measured similarly. For each RT sample, the expression of the above amplicon was normalized to the normalization factor calculated from the expression of these house keeping genes as described in normalization method 2 in the “materials and methods” section. The normalized quantity of each RT sample was then divided by the median of the quantities of the normal samples (sample numbers 52, 53, 54, 55, 56, 57, 58, 59, 60, 61, 62, 63, 64, 65, 66, 67, 68, 69, 70, 71, 72, 73, 74, 75, 76, 77 and 78, Table 1_{—}5 above), to obtain a value of fold up-regulation for each sample relative to the median of the normal samples.

[0960] FIG. 16B is a histogram showing over expression of the above-indicated Homo sapiens myeloma overexpressed gene transcripts in cancerous Ovary samples relative to the normal samples.

[0961] As is evident from FIG. 16B, the expression of Homo sapiens myeloma overexpressed gene transcripts detectable by the above amplicon in adenocarcinoma samples was significantly higher than in the non-cancerous samples (sample numbers 52, 53, 54, 55, 56, 57, 58, 59, 60, 61, 62, 63, 64, 65, 66, 67, 68, 69, 70, 71, 72, 73, 74, 75, 76, 77 and 78, Table 1_{—}5 above). Notably an over-expression of at least 10 fold was found in 15 out of 18 serous carcinoma samples, in 9 out of 9 mucinous carcinoma samples and in 8 out of 10 Endometroid samples.

[0962] Statistical analysis was applied to verify the significance of these results, as described below.

[0963] The P value for the difference in the expression levels of Homo sapiens myeloma overexpressed gene transcripts detectable by the above amplicon in Ovary adenocarcinoma samples versus the normal tissue samples was determined by T test as 1.24e-004. The P value for the difference in the expression levels of Homo sapiens myeloma overexpressed gene transcripts detectable by the above amplicon in Ovary serous carcinoma samples versus the normal tissue samples was determined by T test as 6.72e-004. The P value for the difference in the expression levels of Homo sapiens myeloma overexpressed gene transcripts detectable by the above amplicon in Ovary mucinous carcinoma samples versus the normal tissue samples was determined by T test as 2.86e-002. The P value for the difference in the expression levels of Homo sapiens myeloma overexpressed gene transcripts detectable by the above amplicon in Ovary endometroid samples versus the normal tissue samples was determined by T test as 1.03e-002.

[0964] Threshold of 10 fold over expression was found to differentiate between adenocarcinoma and normal samples with P value of 6.65e-012 as checked by exact Fisher test. Threshold of 10 fold over expression was found to differentiate between serous carcinoma and normal samples with P value of 3.42e-008 as checked by exact Fisher test. Threshold of 10 fold over expression was found to differentiate between mucinous carcinoma and normal samples with P value of 1.06e-007 as checked by exact Fisher test. Threshold of 10 fold over expression was found to differentiate between endometroid and normal samples with P value of 9.81 e-006 as checked by exact Fisher test.

[0965] The above values demonstrate statistical significance of the results.

[0966] Primer pairs are also optionally and preferably encompassed within the present invention; for example, for the above experiment, the following primer pair was used as a non-limiting illustrative example only of a suitable primer pair: AA583399_seg17F (SEQ ID NO: 365) forward primer; and AA583399_seg17R (SEQ ID NO: 366) reverse primer.

[0967] The present invention also preferably encompasses any amplicon obtained through the use of any suitable primer pair; for example, for the above experiment, the following amplicon was obtained as a non-limiting illustrative example only of a suitable amplicon: AA583399_seg17 (SEQ ID NO: 367).

Expression of Homo sapiens Myeloma Overexpressed Gene (in a Subset of t(11;14) Positive Multiple Myelomas) (MYEOV) AA583399 Transcripts which are Detectable by Amplicon as Depicted in Sequence Name AA583399 seg17 (SEQ ID NO: 367) in Different Normal Tissues

[0968] Expression of Homo sapiens myeloma overexpressed gene (in a subset of t(11;14) positive multiple myelomas) (MYEOV) transcripts detectable by or according to AA583399 seg17 (SEQ ID NO: 367) amplicon and primers: AA583399 seg17F (SEQ ID NO: 365) and AA583399 seg17R (SEQ ID NO: 366) was measured by real time PCR. In parallel the expression of four housekeeping genes—RPL19 (GenBank Accession No. NM_{—}000981 (SEQ ID NO:342); RPL19 amplicon (SEQ ID NO: 320)), TATA box (GenBank Accession No. NM_{—}003194 (SEQ ID NO:343); TATA amplicon (SEQ ID NO: 323)), Ubiquitin (GenBank Accession No. BC000449 (SEQ ID NO:341); amplicon—Ubiquitin-amplicon (SEQ ID NO: 317)) and SDHA (GenBank Accession No. NM_{—}004168 (SEQ ID NO:335); amplicon—SDHA-amplicon (SEQ ID NO:299)) was measured similarly. For each RT sample, the expression of the above amplicon was normalized to the geometric mean of the quantities of the housekeeping genes. The normalized quantity of each RT sample was then divided by the median of the quantities of the colon samples (Sample Nos. 69-71 Table 1_{—}9), to obtain a value of relative expression of each sample relative to the median of the colon samples. FIG. 17A shows expression of Homo sapiens myeloma overexpressed gene (in a subset of t(11;14) positive multiple myelomas) (MYEOV) AA583399 transcripts which are detectable by amplicon as depicted in sequence name AA583399 seg17 (SEQ ID NO: 367) in different normal tissues.

[0969] Expression of Homo sapiens myeloma overexpressed gene (in a subset of t(11;14) positive multiple myelomas) (MYEOV) transcripts detectable by or according to seg17—AA583399_seg17 (SEQ ID NO: 367) amplicon and primers AA583399_seg17F (SEQ ID NO: 365) and AA583399_seg17R (SEQ ID NO: 366) was further measured by real time PCR using updated panel, shown in Table 1_{—}10. In parallel the expression of four housekeeping genes—SDHA (GenBank Accession No. NM_{—}004168 (SEQ ID NO:335); amplicon—SDHA-amplicon (SEQ ID NO:299)), Ubiquitin (GenBank Accession No. BC000449 (SEQ ID NO:341); amplicon—Ubiquitin-amplicon (SEQ ID NO: 317)), and TATA box (GenBank Accession No. NM_{—}003194 (SEQ ID NO:343); TATA amplicon (SEQ ID NO: 323)) was measured similarly. For each RT sample, the expression of the above amplicon was normalized to the normalization factor calculated from the expression of these house keeping genes as described in normalization method 2 in the “materials and methods” section. The normalized quantity of each RT sample was then divided by the median of the quantities of the lung samples (sample numbers 26, 27, 28, 29 and 30, Table 1_{—}10 above), to obtain a value of relative expression of each sample relative to the median of the lung samples, as presented in FIG. 17B, or to the median of the quantities of the colon samples (sample numbers 3-5, Table 1_{—}10 above), to obtain a value of relative expression of each sample relative to the median of the colon samples, as presented in FIG. 17C.

Expression of Homo sapiens Myeloma Overexpressed Gene (in a Subset of t(11;14) Positive Multiple Myelomas) (MYEOV) AA583399 Transcripts which are Detectable by Amplicon as Depicted in Sequence Name AA583399_seg30-32 (SEQ ID NO: 370) in Normal and Cancerous Lung Tissues

[0970] Expression of Homo sapiens myeloma overexpressed gene (in a subset of t(11;14) positive multiple myelomas) (MYEOV) transcripts detectable by or according to seg30-32—AA583399_seg30-32 (SEQ ID NO: 370) amplicon and primers AA583399_seg30-32F (SEQ ID NO: 368) and AA583399_seg30-32R (SEQ ID NO: 369) was measured by real time PCR. In parallel the expression of four housekeeping genes—HPRT1 (GenBank Accession No. NM_{—}000194 (SEQ ID NO:337); amplicon—HPRT1-amplicon (SEQ ID NO: 305) (SEQ ID NO: 305)), PBGD (GenBank Accession No. BC019323 (SEQ ID NO:336); amplicon—PBGD-amplicon (SEQ ID NO: 302)), SDHA (GenBank Accession No. NM_{—}004168 (SEQ ID NO:335); amplicon—SDHA-amplicon (SEQ ID NO:299)) and Ubiquitin (GenBank Accession No. BC000449 (SEQ ID NO:341); amplicon—Ubiquitin-amplicon (SEQ ID NO: 317)) was measured similarly. For each RT sample, the expression of the above amplicon was normalized to the geometric mean of the quantities of the housekeeping genes. The normalized quantity of each RT sample was then divided by the median of the quantities of the normal post-mortem (PM) samples (sample numbers 47, 48, 49, 50, 90, 91, 92, 93, 96, 97 and 98, Table 1_{—}2 above), to obtain a value of fold up-regulation for each sample relative to the median of the normal PM samples.

[0971] FIG. 18 is a histogram showing over expression of the Homo sapiens myeloma overexpressed gene (in a subset of t(11;14) positive multiple myelomas) (MYEOV) transcripts detectable by or according to AA583399_seg30-32 (SEQ ID NO: 370) in cancerous Lung samples relative to the normal samples.

[0972] As is evident from FIG. 18, the expression of Homo sapiens myeloma overexpressed gene (in a subset of t(11;14) positive multiple myelomas) (MYEOV) transcripts detectable by the above amplicon in adenocarcinoma, squamous cell carcinoma, large cell carcinoma was significantly higher than in the non-cancerous samples (sample numbers 47, 48, 49, 50, 90, 91, 92, 93, 96, 97 and 98, Table 1_{—}2 above). Notably an over-expression of at least 5 fold was found in 17 out of 35 non-small cell carcinoma samples, specifically in 7 out of 15 adenocarcinoma samples, in 7 out of 16 squamous cell carcinoma samples and in 3 out of 4 large cell carcinoma samples.

[0973] Statistical analysis was applied to verify the significance of these results, as described below.

[0974] The P value for the difference in the expression levels of Homo sapiens myeloma overexpressed gene (in a subset of t(11;14) positive multiple myelomas) (MYEOV) transcripts detectable by the above amplicon in Lung non-small cell carcinoma samples versus the normal tissue samples was determined by T test as 1.60e-002.

[0975] Threshold of 5 fold over expression was found to differentiate between non-small cell carcinoma and normal samples with P value of 2.59e-003 as checked by exact Fisher test. Threshold of 5 fold over expression was found to differentiate between adenocarcinoma and normal samples with P value of 9.78e-003 as checked by exact Fisher test. Threshold of 5 fold over expression was found to differentiate between squamous cell carcinoma and normal samples with P value of 1.29e-002 as checked by exact Fisher test. Threshold of 5 fold over expression was found to differentiate between large cell carcinoma and normal samples with P value of 8.79e-003 as checked by exact Fisher test.

[0976] The above values demonstrate statistical significance of the results.

[0977] Primer pairs are also optionally and preferably encompassed within the present invention; for example, for the above experiment, the following primer pair was used as a non-limiting illustrative example only of a suitable primer pair: AA583399_seg30-32F (SEQ ID NO: 368) forward primer; and AA583399_seg30-32R (SEQ ID NO: 369) reverse primer.

[0978] The present invention also preferably encompasses any amplicon obtained through the use of any suitable primer pair; for example, for the above experiment, the following amplicon was obtained as a non-limiting illustrative example only of a suitable amplicon: AA583399_seg30-32 (SEQ ID NO: 370).

Expression of Homo sapiens Myeloma Overexpressed Gene (in a Subset of t(11;14) Positive Multiple Myelomas) (MYEOV) AA583399 Transcripts which are Detectable by Amplicon as Depicted in Sequence Name AA583399_seg30-32 (SEQ ID NO: 370) in Normal and Cancerous Ovary Tissues

[0979] Expression of Homo sapiens myeloma overexpressed gene (in a subset of t(11;14) positive multiple myelomas) (MYEOV) transcripts detectable by or according to seg30-32—AA583399_seg30-32 (SEQ ID NO: 370) amplicon and primers AA583399_seg30-32F (SEQ ID NO: 368) and AA583399_seg30-32R (SEQ ID NO: 369) was measured by real time PCR. In parallel the expression of four housekeeping genes—SDHA (GenBank Accession No. NM_{—}004168 (SEQ ID NO:335); amplicon—SDHA-amplicon (SEQ ID NO:299)), HPRT1 (GenBank Accession No. NM_{—}000194 (SEQ ID NO:337); amplicon—HPRT1-amplicon (SEQ ID NO: 305) (SEQ ID NO: 305)), PBGD (GenBank Accession No. BC019323 (SEQ ID NO:336); amplicon—PBGD-amplicon (SEQ ID NO: 302)) and GAPDH (GenBank Accession No. BC026907 (SEQ ID NO:338); GAPDH amplicon (SEQ ID NO: 308)) was measured similarly. For each RT sample, the expression of the above amplicon was normalized to the geometric mean of the quantities of the housekeeping genes. The normalized quantity of each RT sample was then divided by the median of the quantities of the normal post-mortem (PM) samples (sample numbers 45, 46, 71 and 48, Table 1_{—}1 above), to obtain a value of fold up-regulation for each sample relative to the median of the normal PM samples.

[0980] FIG. 19 is a histogram showing over expression of the Homo sapiens myeloma overexpressed gene (in a subset of t(11;14) positive multiple myelomas) (MYEOV) transcripts detectable by or according to AA583399_seg30-32 (SEQ ID NO: 370) in cancerous Ovary samples relative to the normal samples.

[0981] As is evident from FIG. 19, the expression of Homo sapiens myeloma overexpressed gene (in a subset of t(11;14) positive multiple myelomas) (MYEOV) transcripts detectable by the above amplicon in adenocarcinoma samples was significantly higher than in the non-cancerous samples (sample numbers 45, 46, 71 and 48, Table 11 above). Notably an over-expression of at least 5 fold was found in 32 out of 43 adenocarcinoma samples, specifically in 19 out of 30 serous carcinoma samples and in 6 out of 6 mucinous carcinoma samples.

[0982] Statistical analysis was applied to verify the significance of these results, as described below.

[0983] The P value for the difference in the expression levels of Homo sapiens myeloma overexpressed gene (in a subset of t(11;14) positive multiple myelomas) (MYEOV) transcripts detectable by the above amplicon in Ovary adenocarcinoma samples versus the normal tissue samples was determined by T test as 8.08e-003.

[0984] The P value for the difference in the expression levels of Homo sapiens myeloma overexpressed gene (in a subset of t(11;14) positive multiple myelomas) (MYEOV) transcripts detectable by the above amplicon in Ovary serous carcinoma samples versus the normal tissue samples was determined by T test as 2.55e-002. Threshold of 5 fold over expression was found to differentiate between adenocarcinoma and normal samples with P value of 7.65e-003 as checked by exact Fisher test. Threshold of 5 fold over expression was found to differentiate between serous carcinoma and normal samples with P value of 2.94e-002 as checked by exact Fisher test. Threshold of 5 fold over expression was found to differentiate between mucinous carcinoma and normal samples with P value of 4.76e-003 as checked by exact Fisher test.

[0985] The above values demonstrate statistical significance of the results.

[0986] Primer pairs are also optionally and preferably encompassed within the present invention; for example, for the above experiment, the following primer pair was used as a non-limiting illustrative example only of a suitable primer pair: AA583399_seg30-32P (SEQ ID NO: 368) forward primer; and AA583399_seg30-32R (SEQ ID NO: 369) reverse primer.

[0987] The present invention also preferably encompasses any amplicon obtained through the use of any suitable primer pair; for example, for the above experiment, the following amplicon was obtained as a non-limiting illustrative example only of a suitable amplicon: AA583399_seg30-32 (SEQ ID NO: 370).

Expression of Homo sapiens Myeloma Overexpressed Gene (in a Subset of t(11; 14) Positive Multiple Myelomas) (MYEOV) AA583399 Transcripts which are Detectable by Amplicon as Depicted in Sequence Name AA583399 seg30-32 (SEQ ID NO: 370) in Different Normal Tissues

[0988] Expression of Homo sapiens myeloma overexpressed gene (in a subset of t(11;14) positive multiple myelomas) (MYEOV) transcripts detectable by or according to AA583399 seg30-32 (SEQ ID NO: 370) amplicon(s) and primers: AA583399 seg30-32F (SEQ ID NO: 368) and AA583399 seg30-32R (SEQ ID NO: 369) was measured by real time PCR. In parallel the expression of four housekeeping genes—RPL19 (GenBank Accession No. NM_{—}000981 (SEQ ID NO:342); RPL19 amplicon (SEQ ID NO: 320)), TATA box (GenBank Accession No. NM_{—}003194 (SEQ ID NO:343); TATA amplicon (SEQ ID NO: 323)), Ubiquitin (GenBank Accession No. BC000449 (SEQ ID NO:341); amplicon—Ubiquitin-amplicon (SEQ ID NO: 317)) and SDHA (GenBank Accession No. NM_{—}004168 (SEQ ID NO:335); amplicon—SDHA-amplicon (SEQ ID NO:299)) was measured similarly. For each RT sample, the expression of the above amplicon was normalized to the geometric mean of the quantities of the housekeeping genes. The normalized quantity of each RT sample was then divided by the median of the quantities of the colon samples (Sample Nos. 69-71 Table 1_{—}9), to obtain a value of relative expression of each sample relative to the median of the colon samples. FIG. 20 shows Expression of Homo sapiens myeloma overexpressed gene (in a subset of t(11;14) positive multiple myelomas) (MYEOV) AA583399 transcripts which are detectable by amplicon as depicted in sequence name AA583399_seg30-32 (SEQ ID NO: 370) in different normal tissues.

[0989] Expression of Homo sapiens Myeloma Overexpressed Gene (in a Subset of t(11;14) Positive Multiple Myelomas) (MYEOV) AA583399 Transcripts which are Detectable by Amplicon as Depicted in Sequence Name AA583399_seg17 (SEQ ID NO: 367) in Normal and Cancerous Colon Tissues

[0990] Expression of Homo sapiens myeloma overexpressed gene (in a subset of t(11;14) positive multiple myelomas) (MYEOV) transcripts detectable by or according to seg17—AA583399_seg17 (SEQ ID NO: 367) amplicon and primers AA583399_seg17F (SEQ ID NO: 365) and AA583399_seg17R (SEQ ID NO: 366) was measured by real time PCR. In parallel the expression of three housekeeping genes—HPRT1 (GenBank Accession No. NM_{—}000194 (SEQ ID NO:337); amplicon—HPRT1-amplicon (SEQ ID NO: 305) (SEQ ID NO: 305)), PBGD (GenBank Accession No. BC019323 (SEQ ID NO:336); amplicon—PBGD-amplicon (SEQ ID NO: 302)), and G6PD (GenBank Accession No. NM_{—}000402 (SEQ ID NO:339); G6PD amplicon (SEQ ID NO: 311)) was measured similarly. For each RT sample, the expression of the above amplicon was normalized to the normalization factor calculated from the expression of these house keeping genes as described in normalization method 2 in the “materials and methods” section. The normalized quantity of each RT sample was then divided by the median of the quantities of the normal samples (sample numbers 42, 43, 44, 45, 46, 47, 48, 49, 50, 51, 53, 54, 55, 56, 57, 58, 59, 60, 61, 62, 63, 64, 65, 66, 67, 68, 69 and 70, Table 1_{—}8 above), to obtain a value of fold up-regulation for each sample relative to the median of the normal samples.

[0991] FIG. 21 is a histogram showing over expression of the above-indicated Homo sapiens myeloma overexpressed gene (in a subset of t(11;14) positive multiple myelomas) (MYEOV) transcripts in cancerous Colon samples relative to the normal samples.

[0992] As is evident from FIG. 21, the expression of Homo sapiens myeloma overexpressed gene (in a subset of t(11;14) positive multiple myelomas) (MYEOV) transcripts detectable by the above amplicon in cancer samples was significantly higher than in the non-cancerous samples (sample numbers 42, 43, 44, 45, 46, 47, 48, 49, 50, 51, 53, 54, 55, 56, 57, 58, 59, 60, 61, 62, 63, 64, 65, 66, 67, 68, 69 and 70, Table 1_{—}8 above). Notably an over-expression of at least 5 fold was found in 21 out of 55 adenocarcinoma samples.

[0993] Statistical analysis was applied to verify the significance of these results, as described below.

[0994] The P value for the difference in the expression levels of Homo sapiens myeloma overexpressed gene (in a subset of t(11;14) positive multiple myelomas) (MYEOV) transcripts detectable by the above amplicon in Colon cancer samples versus the normal tissue samples was determined by T test as 8.23e-004.

[0995] Threshold of 5 fold over expression was found to differentiate between cancer and normal samples with P value of 3.59e-004 as checked by exact Fisher test.

[0996] The above values demonstrate statistical significance of the results.

[0997] Primer pairs are also optionally and preferably encompassed within the present invention; for example, for the above experiment, the following primer pair was used as a non-limiting illustrative example only of a suitable primer pair: AA583399_seg17F (SEQ ID NO: 365) forward primer; and AA583399_seg17R (SEQ ID NO: 366) reverse primer.

[0998] The present invention also preferably encompasses any amplicon obtained through the use of any suitable primer pair; for example, for the above experiment, the following amplicon was obtained as a non-limiting illustrative example only of a suitable amplicon: AA583399_seg17 (SEQ ID NO: 367).

Expression of Homo sapiens Myeloma Overexpressed Gene AA583399 Transcripts which are Detectable by Amplicon as Depicted in Sequence Name AA583399_seg17 (SEQ ID NO: 367) in Normal and Cancerous Breast Tissues

[0999] Expression of Homo sapiens myeloma overexpressed gene transcripts detectable by or according to seg17-AA583399_seg17 (SEQ ID NO: 367) amplicon and primers AA583399_seg17F (SEQ ID NO: 365) and AA583399_seg17R (SEQ ID NO: 366) was measured by real time PCR. In parallel the expression of four housekeeping genes—G6PD (GenBank Accession No. NM_{—}000402 (SEQ ID NO:339); G6PD amplicon (SEQ ID NO: 311)), RPL19 (GenBank Accession No. NM_{—}000981 (SEQ ID NO:342); RPL19 amplicon (SEQ ID NO: 320)), PBGD (GenBank Accession No. BC019323 (SEQ ID NO:336); amplicon—PBGD-amplicon (SEQ ID NO: 302)) and SDHA (GenBank Accession No. NM_{—}004168 (SEQ ID NO:335); amplicon—SDHA-amplicon (SEQ ID NO:299)) was measured similarly. For each RT sample, the expression of the above amplicon was normalized to the normalization factor calculated from the expression of these house keeping genes as described in normalization method 2 in the “materials and methods” section. The normalized quantity of each RT sample was then divided by the median of the quantities of the normal samples (sample numbers 43, 45, 46, 47, 48, 49, 50, 51, 52, 54, 56, 58, 59, 60, 61, 62, 63, 64, 65, 66, 67, 68 and 69, Table 1_{—}7 above). Then the reciprocal of this ratio was calculated, to obtain a value of fold down-regulation for each sample relative to the median of the normal samples.

[1000] FIG. 22 is a histogram showing down regulation of the above-indicated Homo sapiens myeloma overexpressed gene transcripts in cancerous Breast samples relative to the normal samples.

[1001] As is evident from FIG. 22, the expression of Homo sapiens myeloma overexpressed gene transcripts detectable by the above amplicon in cancer samples was lower than in the non-cancerous samples (sample numbers 43, 45, 46, 47, 48, 49, 50, 51, 52, 54, 56, 58, 59, 60, 61, 62, 63, 64, 65, 66, 67, 68 and 69, Table 1_{—}7 above). Notably down regulation of at least 5 fold was found in 10 out of 37 adenocarcinoma samples.

[1002] Statistical analysis was applied to verify the significance of these results, as described below.

[1003] The P value for the difference in the expression levels of Homo sapiens myeloma overexpressed gene (in a subset of t(11;14) positive multiple myelomas) (MYEOV) transcripts detectable by the above amplicon in breast cancer samples versus the normal tissue samples was determined by T test as 9.90e-03.

[1004] Threshold of 5 fold over expression was found to differentiate between cancer and normal samples with P value of 4.62e-03 as checked by exact Fisher test.

[1005] The above values demonstrate statistical significance of the results.

[1006] Primer pairs are also optionally and preferably encompassed within the present invention; for example, for the above experiment, the following primer pair was used as a non-limiting illustrative example only of a suitable primer pair: AA583399_seg17F (SEQ ID NO: 365) forward primer; and AA583399_seg17R (SEQ ID NO: 366) reverse primer.

[1007] The present invention also preferably encompasses any amplicon obtained through the use of any suitable primer pair; for example, for the above experiment, the following amplicon was obtained as a non-limiting illustrative example only of a suitable amplicon: AA583399_seg17 (SEQ ID NO: 367).

### Description for Cluster H13410

[1008] Cluster H13410 features 6 transcript(s) and 40 segment(s) of interest, the names for which are given in Tables 58 and 59, respectively, the sequences themselves are given in the “Sequence Listing” of the application. The selected protein variants are given in table 60.

TABLE 58
Transcripts of interest
Transcript Name

H13410_T8 (SEQ ID NO: 87)
H13410_T12 (SEQ ID NO: 88)
H13410_T18 (SEQ ID NO: 89)
H13410_T21 (SEQ ID NO: 90)
H13410_T27 (SEQ ID NO: 91)
H13410_T35 (SEQ ID NO: 92)

TABLE 59
Segments of interest
Segment Name

H13410_N6 (SEQ ID NO: 93)
H13410_N8 (SEQ ID NO: 94)
H13410_N10 (SEQ ID NO: 95)
H13410_N14 (SEQ ID NO: 96)
H13410_N20 (SEQ ID NO: 97)
H13410_N27 (SEQ ID NO: 98)
H13410_N29 (SEQ ID NO: 99)
H13410_N36 (SEQ ID NO: 100)
H13410_N37 (SEQ ID NO: 101)
H13410_N39 (SEQ ID NO: 102)
H13410_N42 (SEQ ID NO: 103)
H13410_N54 (SEQ ID NO: 104)
H13410_N56 (SEQ ID NO: 105)
H13410_N58 (SEQ ID NO: 106)
H13410_N68 (SEQ ID NO: 107)
H13410_N0 (SEQ ID NO: 108)
H13410_N1 (SEQ ID NO: 109)
H13410_N4 (SEQ ID NO: 110)
H13410_N5 (SEQ ID NO: 111)
H13410_N12 (SEQ ID NO: 112)
H13410_N16 (SEQ ID NO: 113)
H13410_N18 (SEQ ID NO: 114)
H13410_N22 (SEQ ID NO: 115)
H13410_N31 (SEQ ID NO: 116)
H13410_N33 (SEQ ID NO: 117)
H13410_N35 (SEQ ID NO: 118)
H13410_N44 (SEQ ID NO: 119)
H13410_N45 (SEQ ID NO: 120)
H13410_N46 (SEQ ID NO: 121)
H13410_N48 (SEQ ID NO: 122)
H13410_N49 (SEQ ID NO: 123)
H13410_N51 (SEQ ID NO: 124)
H13410_N55 (SEQ ID NO: 125)
H13410_N57 (SEQ ID NO: 126)
H13410_N59 (SEQ ID NO: 127)
H13410_N60 (SEQ ID NO: 128)
H13410_N67 (SEQ ID NO: 129)
H13410_N69 (SEQ ID NO: 130)
H13410_N70 (SEQ ID NO: 131)
H13410_N71 (SEQ ID NO: 132)
H13410_N10 (SEQ ID NO: 95)

TABLE 60
Proteins of interest

| Protein Name | Corresponding Transcript(s) |
|---|---|
| H13410_P4 (SEQ ID NO: 139) | H13410_T12 (SEQ ID NO: 88) |
| H13410_P8 (SEQ ID NO: 140) | H13410_T27 (SEQ ID NO: 91) |
| H13410_P9 (SEQ ID NO: 141) | H13410_T18 (SEQ ID NO: 89) |
| H13410_P20 (SEQ ID NO: 142) | H13410_T35 (SEQ ID NO: 92) |
| H13410_P46 (SEQ ID NO: 143) | H13410_T8 (SEQ ID NO: 87) |
| H13410_P47 (SEQ ID NO: 144) | H13410_T21 (SEQ ID NO: 90) |

[1009] These sequences are variants of the known protein maba1 (SwissProt accession identifier NP_{—}065826 (SEQ ID NO:344)), referred to herein as the previously known protein.

[1010] Additional sequences for known maba1 proteins are given in SEQ ID NO:133-138. The sequences of known maba1 mRNA transcript is given in SEQ ID NO:491. The sequence given in SEQ ID NO: 420 represents the segment corresponding to H13410_node10, from which the amplicon, used for detection of differential expression of the known maba1 transcript, derives.

[1011] The variants H13410_P4 and H13410_P9 were also previously disclosed by the inventors in published PCT application no WO2005/071058, hereby incorporated by reference as if fully set forth herein, but have now been shown to have novel and surprising diagnostic uses as described herein for other variants of cluster H13410.

[1012] Cluster H13410 can be used as a diagnostic marker according to overexpression of transcripts of this cluster in cancer. Expression of such transcripts in normal tissues is also given according to the previously described methods. The term “number” in the left hand column of the table and the numbers on the y-axis of FIG. 23 refer to weighted expression of ESTs in each category, as “parts per million” (ratio of the expression of ESTs for a particular cluster to the expression of all ESTs in that category, according to parts per million).

[1013] Overall, the following results were obtained as shown with regard to the histograms in FIG. 23 and Table 61. This cluster is overexpressed (at least at a minimum level) in the following pathological conditions: a mixture of malignant tumors from different tissues, uterine malignancies and epithelial malignant tumors.

TABLE 61
Normal tissue distribution

| Name of Tissue | Number |
|---|---|
| brain | 7 |
| ovary | 0 |
| lung | 0 |
| general | 34 |
| Thyroid | 0 |
| pancreas | 194 |
| uterus | 22 |
| colon | 144 |
| prostate | 127 |
| breast | 73 |
| stomach | 115 |
| epithelial | 47 |

TABLE 62
P values and ratios for expression in cancerous tissue

| Name of Tissue | P1 | P2 | SP1 | R3 | SP2 | R4 |
|---|---|---|---|---|---|---|
| brain | 8.2e−01 | 8.9e−01 | 5.1e−01 | 1.2 | 7.5e−01 | 0.7 |
| ovary | 3.8e−01 | 4.2e−01 | 3.2e−01 | 2.4 | 4.5e−01 | 1.9 |
| lung | 1.1e−01 | 1.4e−01 | N/A | N/A | N/A | N/A |
| general | 1.7e−04 | 5.5e−02 | 2.1e−07 | 1.9 | 4.9e−02 | 1.1 |
| Thyroid | 3.6e−01 | 3.6e−01 | N/A | N/A | N/A | N/A |
| pancreas | 5.4e−01 | 6.7e−01 | 1.0e+00 | 0.3 | 1.0e+00 | 0.2 |
| uterus | 3.1e−02 | 2.2e−01 | 9.8e−05 | 3.8 | 1.2e−02 | 2.1 |
| colon | 7.0e−01 | 7.9e−01 | 9.4e−01 | 0.5 | 9.8e−01 | 0.4 |
| prostate | 1.3e−01 | 2.9e−01 | 1.1e−01 | 1.5 | 3.8e−01 | 1.0 |
| breast | 1.8e−01 | 3.2e−01 | 9.6e−02 | 2.0 | 1.4e−01 | 1.4 |
| stomach | 4.5e−01 | 8.1e−01 | 1.0e+00 | 0.3 | 9.4e−01 | 0.4 |
| epithelial | 5.6e−03 | 2.1e−01 | 1.1e−04 | 1.7 | 1.5e−01 | 1.0 |

[1014] As noted above, cluster H13410 features 6 transcript(s), which were listed in Table 58 above. These transcript(s) encode for protein(s) which are variant(s) of protein maba1 (SEQ ID NO: 133). A description of each variant protein according to the present invention is now provided.

[1015] Variant protein H13410_P4 (SEQ ID NO: 139) according to the present invention has an amino acid sequence as given in the “Sequence Listing” of the application; it is encoded by transcript(s) H13410_T12 (SEQ ID NO: 88). An alignment is given to the known protein (maba1, SEQ ID NOs:133-138) in the alignment table, on the attached CDROM. One or more alignments to one or more previously published protein sequences are given in the alignment table, on the attached CDROM. A brief description of the relationship of the variant protein according to the present invention to each such aligned protein is as follows:

### 1. Comparison Report Between H13410_P4 (SEQ ID NO: 139) and Q6UXG2_HUMAN (SEQ ID NO: 137) (or NP_{—}065826 (SEQ ID NO:344)):

[1016] A. An isolated chimeric polypeptide encoding for H13410_P4 (SEQ ID NO: 139), comprising a first amino acid sequence being at least about 90% homologous to MAEPGHSHHLSARVRGRTERRIPRLWRLLLWAGTAFQVTQGTGPELHACKESEYHYEYTACDSTGSRWR VAVPHTPGLCTSLPDPVKGTECSFSCNAGEFLDMKDQSCKPCAEGRYSLGTGIRFDEWDELPHGFASLSAN MELDDSAAESTGNCTSSKWVPRGDYIASNTDECTATLMYAVNLKQSGTVNFEYYYPDSSIIFEFFVQNDQ CQPNADDSRWMKTTEKGWEFHSVELNRGNNVLYWRTTAFSVWTKVPKPVLVRNIAITGVAYTSECFPCK PGTYADKQGSSFCKLCPANSYSNKGETSCHQCDPDKYSEKGSSSCNVRPACTDKDYFYTHTACDANGET QLMYKWAKPKICSEDLEGAVKLPASGVKTHCPPCNPGFFKTNNSTCQPCPYGSYSNGSDCTRCPAGTEPA VGFEYKWWNTLP NMETTVLSGINFEYKGMTGWEVAGDHIYTAAGASDNDFMILTLVVPGFRPPQSVMA DTENKEVARITFVFETLCSVNCELYFMV corresponding to amino acids 1-515 of Q6UXG2_HUMAN (SEQ ID NO: 137), which also corresponds to amino acids 1-515 of H13410_P4 (SEQ ID NO: 139), and a second amino acid sequence being at least about 70%, optionally at least 80%, preferably at least 85%, more preferably at least 90% and most preferably at least 95% homologous to a polypeptide having the sequence VRFPFFAR (SEQ ID NO: 499) corresponding to amino acids 516-523 of H13410_P4 (SEQ ID NO: 139), wherein said first amino acid sequence and second amino acid sequence are contiguous and in a sequential order.

[1017] B. An isolated polypeptide encoding for an edge portion of H13410_P4 (SEQ ID NO: 139), comprising an amino acid sequence being at least about 70%, optionally at least about 80%, preferably at least about 85%, more preferably at least about 90% and most preferably at least about 95% homologous to the sequence VRFPFFAR (SEQ ID NO: 499) of H13410_P4 (SEQ ID NO: 139).

[1018] The localization of the variant protein was determined according to results from a number of different software programs and analyses, including analyses from SignalP and other specialized programs. The variant protein is believed to be secreted.

[1019] Variant protein H13410_P4 (SEQ ID NO: 139) also has the following non-silent SNPs (Single Nucleotide Polymorphisms) as listed in Table 63, (given according to their position(s) on the amino acid sequence, with the alternative amino acid(s) listed).

TABLE 63
Amino acid mutations

| SNP position(s) on amino acid | |
|---|---|
| sequence | Alternative amino acid(s) |
| 16 | G -> * |
| 16 | G -> R |
| 86 | V -> I |

[1020] Variant protein H13410_P4 (SEQ ID NO: 139) is encoded by the following transcript(s): H13410_T12 (SEQ ID NO: 88), for which the coding portion starts at position 138 and ends at position 1706. The transcript also has the following SNPs as listed in Table 64 (given according to their position on the nucleotide sequence, with the alternative nucleic acid listed).

TABLE 64
Nucleic acid SNPs

| | SNP position(s) on nucleotide |
|---|---|
| Polymorphism | sequence |
| G -> A | 183, 393 |
| G -> T | 183 |
| T -> C | 278, 2468, 2359 |
| C -> T | 2140, 3417, 2428 |
| C -> A | 2258 |
| A -> G | 2386, 2902 |
| C -> G | 3271 |
| C -> | 3271 |

[1021] Variant protein H13410_P8 (SEQ ID NO: 140) according to the present invention has an amino acid sequence as given in the “Sequence Listing” of the application; it is encoded by transcript(s) H13410_T27 (SEQ ID NO: 91). An alignment is given to the known protein (maba1 SEQ ID NOs:133-138) in the alignment table, on the attached CDROM. One or more alignments to one or more previously published protein sequences are given in the alignment table, on the attached CDROM. A brief description of the relationship of the variant protein according to the present invention to each such aligned protein is as follows:

### 1. Comparison Report Between H13410_P8 (SEQ ID NO: 140) and Q6UXG2_HUMAN (SEQ ID NO: 137):

[1022] A. An isolated chimeric polypeptide encoding for H13410_P8 (SEQ ID NO: 140), comprising a first amino acid sequence being at least about 90% homologous to MAEPGHSHHLSARVRGRTERRIPRLWRLLLWAGTAFQVTQGTGPELHACKESEYHYEYTACDSTGSRWR VAVPHTPGLCTSLPDPVKGTECSFSCNAGEFLDMKDQSCKPCAEGRYSLGTGIRFDEWDELPHGFASLSAN MELDDSAAESTGNCTSSKWVPRGDYIASNTDECTATLMYAVNLKQSGTVNFEYYYPDSSIIFEFFVQNDQ CQPNADDSRWMKTTEKGWEFHSVELNRGNNVLYWRTTAFSVWTKVPKPVLVRNIAITGVAYTSECFPCK PGTYADKQGSSFCKLCPANSYSNKGETSCHQCDPDKYSEKGSSSCNVRPACTDKDYFYTHTACDANGET QLMYKWAKPKICSEDLEGAVKLPASGVKTHCPPCNPGFFKTNNSTCQPCPYGSYSNGSDCTRCPAGTEPA VGFEYKWWNTLPTNMETTVLSGINFEYKGMTGWEVAGDHIYTAAGASDNDFMILTLVVPGFRPPQSVMA DTENKEVARITFVFETLCSVNCELYFMVGVNSRTNTPVETWKGSKGKQSYTYIIEENTTTSFTWAFQRTTF HEASRKYTNDVAKIYSINVTNVMNGVASYCRPCALEASDVGSSCTSCPAGYYIDRDSGTCHSCPPNTILKA HQPYGVQACVPCGPGTKNNKIHSLCYNDCTFSRNTPIRTFNYNFSALANTVTLAGGPSFTSKGLKYFHHFT LSLCGNQGRKMSVCTDNVTDLRIPEGESGFSKSITAYVCQAVIIPPEVTGYKAGVSSQPVSLADRLIGVTTD MTLDGITSPAELFHLESLGIPDVIFFYRSNDVTQSCSSGRSTTIRVRCSPQKTVPGSLLLPGTCSDGTCDGCN FHFLWESAAACPLCSVADYHAIVSSCVAGIQ corresponding to amino acids 1-876 of Q6UXG2_HUMAN (SEQ ID NO: 137), which also corresponds to amino acids 1-876 of H13410_P8 (SEQ ID NO: 140), and a second amino acid sequence being at least about 70%, optionally at least 80%, preferably at least 85%, more preferably at least 90% and most preferably at least 95% homologous to a polypeptide having the sequence VGFPLIGHFHEIRREWEI (SEQ ID NO: 500) corresponding to amino acids 877-893 of H13410_P8 (SEQ ID NO: 140), wherein said first amino acid sequence and second amino acid sequence are contiguous and in a sequential order.

[1023] B. An isolated polypeptide encoding for an edge portion of H13410_P8 (SEQ ID NO: 140), comprising an amino acid sequence being at least about 70%, optionally at least about 80%, preferably at least about 85%, more preferably at least about 90% and most preferably at least about 95% homologous to the sequence VGFPLIGHFHERREWEI (SEQ ID NO: 500) of H13410_P8 (SEQ ID NO: 140).

### 2. Comparison Report Between H13410_P8 (SEQ ID NO: 140) and NP_{—}065826 (SEQ ID NO:344):

[1024] A. An isolated chimeric polypeptide encoding for H13410_P8 (SEQ ID NO: 140), comprising a first amino acid sequence being at least about 90% homologous to MAEPGHSHHLSARVRGRTERRIPRLWRLLLWAGTAFQVTQGTGPELHACKESEYHYEYTACDSTGSRWR VAVPHTPGLCTSLPDPVKGTECSFSCNAGEFLDMKDQSCKPCAEGRYSLGTGIRFDEWDELPHGFASLSAN MELDDSAAESTGNCTSSKWVPRGDYIASNTDECTATLMYAVNLKQSGTVNFEYYYPDSSIIFEFFVQNDQ CQPNADDSRWMKTTEKGWEFHSVELNRGNNVLYWRTTAFSVWTKVPKPVLVRNIAITGVAYTSECFPCK PGTYADKQGSSFCKLCPANSYSNKGETSCHQCDPDKYSEKGSSSCNVRPACTDKDYFYTHTACDANGET QLMYKWAKPKICSEDLEGAVKLPASGVKTHCPPCNPGFFKTNNSTCQPCPYGSYSNGSDCTRCPAGTEPA VGFEYKWWNTLPTNMETTVLSGINFEYKGMTGWEVAGDHIYTAAGASDNDFMILTLVVPGFRPPQSVMA DTENKEVARITFVFETLCSVNCELYFMVGVNSRTNTPVETWKGSKGKQSYTYIIEENTTTSFTWAFQRTTF HEASRKYTNDVAKIYSINVTNVMNGVASYCRPCALEASDVGSSCTSCPAGYYIDRDSGTCHSCP corresponding to amino acids 1-622 of NP_{—}065826 (SEQ ID NO:344), which also corresponds to amino acids 1-622 of H13410_P8 (SEQ ID NO: 140), a bridging amino acid P corresponding to amino acid 623 of H13410_P8 (SEQ ID NO: 140), a second amino acid sequence being at least about 90% homologous to NTILKAHQPYGVQACVPCGPGTKNNKIHSLCYNDCTFSRNTPTRTFNYNFSALANTVTLAGGPSFTSKGLK YFHHFTLSLCGNQGRKMSVCTDNVTDLRIPEGESGFSKSITAYVCQAVIIPPEVTGYKAGVSSQPVSLADRL IGVTTDMTLDGITSPAELFHLESLGIPDVIFFYRSNDVTQSCSSGRSTTIRVRCSPQKTVPGSLLLPGTCSDGT CDGCNFHFLWESAAACPLCSVADYHAIVSSCVAGIQ corresponding to amino acids 624-876 of NP_{—}065826 (SEQ ID NO:344), which also corresponds to amino acids 624-876 of H13410_P8 (SEQ ID NO: 140), and a third amino acid sequence being at least about 70%, optionally at least 80%, preferably at least 85%, more preferably at least 90% and most preferably at least 95% homologous to a polypeptide having the sequence VGFPLIGHFHERREWEI (SEQ ID NO: 500) corresponding to amino acids 877-893 of H13410_P8 (SEQ ID NO: 140), wherein said first amino acid sequence, bridging amino acid, second amino acid sequence and third amino acid sequence are contiguous and in a sequential order.

### 3. Comparison Report Between H13410_P8 (SEQ ID NO: 140) and Q8N1G3_HUMAN (SEQ ID NO: 136):

[1025] A. An isolated chimeric polypeptide encoding for H13410_P8 (SEQ ID NO: 140), comprising a first amino acid sequence being at least about 70%, optionally at least 80%, preferably at least 85%, more preferably at least 90% and most preferably at least 95%, homologous to a polypeptide having the sequence MAEPGHSHHLSARVRGRTERRIPRLWRLLLWAGTAFQVTQGTGPELHACKESEYHYEYTACDSTGSRWR VAVPHTPGLCTSLPDPVKGTECSFSCNAGEFLDMKDQSCKPCAEGRYSLGTGIRFDEWDELPHGFASLSAN MELDDSAAESTGNCTSSKWVPRGDYIASNTDECTATLMYAVNLKQSGTVNFEYYYPDSSIIFEFFVQNDQ CQPNADDSRWMKTTEKGWEFHSVELNRGNNVLYWRTTAFSVWTKVPKPVLVRNIAITGVAYTSECFPCK PGTYADKQGSSFCKLCPANSYSNKGETSCHQCDPDKYSEKGSSSCNVRPACTDKDYFYTHTACDANGET QL (SEQ ID NO: 501) corresponding to amino acids 1-350 of H13410_P8 (SEQ ID NO: 140), a second amino acid sequence being at least about 90% homologous to MYKWAKPKICSEDLEGAVKLPASGVKTHCPPCNPGFFKTNNSTCQPCPYGSYSNGSDCTRCPAGTEPAVG FEYKWWNTLPTNMETTVLSGINFEYKGMTGWEVAGDHIYTAAGASDNDFMILTLVVPGFRPPQSVMADT ENKEVARITFVFETLCSVNCELYFMVGVNSRTNTPVETWKGSKGKQSYTYIIEENTTTSFTWAFQRTTFHE ASRKYTNDVAKIYSINVTNVMNGVASYCRPCALEASDVGSSCTSCPAGYYIDRDSGTCHSCPPNTILKAHQ PYGVQACVPCGPGTKNNKIHSLCYNDCTFSRNTPTRTFNYNFSALANTVTLAGGPSFTSKGLKYFHHFTLS LCGNQGRKMSVCTDNVTDLRIPEGESGFSKSITAYVCQAVIIPPEVTGYKAGVSSQPVSLADRLIGVTTDM TLDGITSPAELFHLESLGIPDVIFFYRSNDVTQSCSSGRSTTIRVRCSPQKTVPGSLLLPGTCSDGTCDGCNFH FLWESAAACPLCSVADYHAIVSSCVAGIQ corresponding to amino acids 1-526 of Q8N1G3_HUMAN (SEQ ID NO: 136), which also corresponds to amino acids 351-876 of H13410_P8 (SEQ ID NO: 140), and a third amino acid sequence being at least about 70%, optionally at least 80%, preferably at least 85%, more preferably at least 90% and most preferably at least 95% homologous to a polypeptide having the sequence VGFPLIGHFHERREWEI (SEQ ID NO: 500) corresponding to amino acids 877-893 of H13410_P8 (SEQ ID NO: 140), wherein said first amino acid sequence, second amino acid sequence and third amino acid sequence are contiguous and in a sequential order.

[1026] B. An isolated polypeptide encoding for a head of H13410_P8 (SEQ ID NO: 140), comprising a polypeptide being at least 70%, optionally at least about 80%, preferably at least about 85%, more preferably at least about 90% and most preferably at least about 95% homologous to the sequence

(SEQ ID NO: 501)

MAEPGHSHHLSARVRGRTERRIPRLWRLLLWAGTAFQVTQGTGPELHACK
ESEYHYEYTACDSTGSRWRVAVPHTPGLCTSLPDPVKGTECSFSCNAGEF
LDMKDQSCKPCAEGRYSLGTGIRFDEWDELPHGFASLSANMELDDSAAES
TGNCTSSKWVPRGDYIASNTDECTATLMYAVNLKQSGTVFEYYYPDSSII
FEFFVQNDQCQPNADDSRWMKTTEKGWEFHSVELNRGNNVLYWRTTAFSV
WTKVPKPVLVRNIAITGVAYTSECFPCKPGTYADKQGSSFCKLCPANSYS
NKGETSCHQCDPDKYSEKGSSSCNVRPACTDKDYFYTHTACDANGETQL
of

(SEQ ID NO: 140)

H13410_P8.

### 4. Comparison Report Between H13410_P8 (SEQ ID NO: 140) and Q5T5C9_HUMAN (SEQ ID NO: 138):

[1027] A. An isolated chimeric polypeptide encoding for H13410_P8 (SEQ ID NO: 140), comprising a first amino acid sequence being at least about 70%, optionally at least 80%, preferably at least 85%, more preferably at least 90% and most preferably at least 95%, homologous to a polypeptide having the sequence MAEPGHSHHLSARVRGRTERRIPRLWRLLLWAGTAFQVTQGTGPELHACKESEYHYEYTACDSTGSRWR VAVPHTPGLCTSLPDPVKGTECSFSCNAGEFLDMKDQSCKPCAEGRYSLGTGIRFDEWDELPHGFASLSAN MELDDSAAESTGNCTSSKWVPRGDYIASNTDECTATLMYAVNLKQSGTVNFEYYYPDSSIIFEFFVQNDQ CQPNADDSRWMKTTEKGWEFHSVELNRGNNVLYWRTTAFSVWTKVPKPVLVRNIAITGVAYTSECFPCK PGTYADKQGSSFCKLCPANSYSNKGETSCHQCDPDKYSEKGSSSCNVRPACTDKDYFYTHTACDANGET QL (SEQ ID NO: 501) corresponding to amino acids 1-350 of H13410_P8 (SEQ ID NO: 140), a second amino acid sequence being at least about 90% homologous to MYKWAKPKICSEDLEGAVKLPASGVKTHCPPCNPGFFKTNNSTCQPCPYGSYSNGSDCTRCPAGTEPAVG FEYKWUVNTLPTNMETTVLSGINFEYKGMTGWEVAGDHIYTAAGASDNDFMILTLVVPGFRPPQSVMADT ENKEVARITFVFETLCSVNCELYFMVGVNSRTNTPVETWKGSKGKQSYTYIIEENTTTSFTWAFQRTTFHE ASRKYTNDVAKIYSINVTNVMNGVASYCRPCALEASDVGSSCTSCPAGYYIDRDSGTCHSCP corresponding to amino acids 1-272 of Q5T5C9-HUMAN (SEQ ID NO: 138), which also corresponds to amino acids 351-622 of H13410_P8 (SEQ ID NO: 140), a bridging amino acid P corresponding to amino acid 623 of H13410_P8 (SEQ ID NO: 140), a third amino acid sequence being at least about 90% homologous to NTILKAHQPYGVQACVPCGPGTKNNKIHSLCYNDCTFSRNTPTRTFNYNFSALANTVTLAGGPSFTSKGLK YFHHFTLSLCGNQGRKMSVCTDNVTDLRIPEGESGFSKSITAYVCQAVIIPPEVTGYKAGVSSQPVSLADRL IGVTTDMTLDGITSPAELFHLESLGIPDVIFFYRSNDVTQSCSSGRSTTIRVRCSPQKTVPGSLLLPGTCSDGT CDGCNFHFLWESAAACPLCSVADYHAIVSSCVAGIQ corresponding to amino acids 274-526 of Q5T5C9_HUMAN (SEQ ID NO: 138), which also corresponds to amino acids 624-876 of H13410_P8 (SEQ ID NO: 140), and a fourth amino acid sequence being at least about 70%, optionally at least 80%, preferably at least 85%, more preferably at least 90% and most preferably at least 95% homologous to a polypeptide having the sequence VGFPLIGHFHERREWEI (SEQ ID NO: 500) corresponding to amino acids 877-893 of H13410_P8 (SEQ ID NO: 140), wherein said first amino acid sequence, second amino acid sequence, bridging amino acid, third amino acid sequence and fourth amino acid sequence are contiguous and in a sequential order.

### 5. Comparison Report Between H13410_P8 (SEQ ID NO: 140) and Q9P2M2_HUMAN (SEQ ID NO: 135):

[1028] A. An isolated chimeric polypeptide encoding for H13410_P8 (SEQ ID NO: 140), comprising a first amino acid sequence being at least about 70%, optionally at least 80%, preferably at least 85%, more preferably at least 90% and most preferably at least 95%, homologous to a polypeptide having the sequence MAEPGHSHHLSARVRGRTERRIPRLWRLLLWAGTAFQVTQGTGPELHACKESEYHYEYTACDSTGSRWR VAVPHTPGLCTSLPDPVKGTECSFSCNAGEFLDMKDQSCKPCAEGRYSLGTGIRFDEWDELPHGFASLSAN MELDDSAAESTGNCTSSKWVPRGDYIASNTDECTATLMYAVNLKQSGTVNFEYYYPDSSIIFEFFVQNDQ CQPNADDSRWMKTTEKGWEFHSVELNRGNNVLYWRTTAFSVWTKVPKPVLVRNIAITGVAYTSECFPCK PGTYADKQGSSFCKLCPANSYSNKGETSCHQCDPDKYSEKGSSSCNVRPACTDKDYFYTHTACDANGET QLMYKWAKPKICSEDLEGAVKLPASGVKTHCPPCNPGFFKTNNSTCQPCPYGSYSNGSDCTRCPAGTEPA VGFEYK (SEQ ID NO: 502) corresponding to amino acids 1-424 of H13410_P8 (SEQ ID NO: 140), a second amino acid sequence being at least about 90% homologous to WWNTLPTNMETTVLSGINFEYKGMTGWEVAGDHIYTAAGASDNDFMILTLVVPGFRPPQSVMADTENKE VARITFVFETLCSVNCELYFMVGVNSRTNTPVETWKGSKGKQSYTYIIEENTTTSFTWAFQRTTFHEASRK YTNDVAKIYSINVTNVMNGVASYCRPCALEASDVGSSCTSCPAGYYIDRDSGTCHSCPPNTILKAHQPYGV QACVPCGPGTKNNKIHSLCYNDCTFSRNTPTRTFNYNFSALANTVTLAGGPSFTSKGLKYFHHFTLSLCGN QGRKMSVCTDNVTDLRIPEGESGFSKSITAYVCQAVIIPPEVTGYKAGVSSQPVSLADRLIGVTTDMTLDGI TSPAELFHLESLGIPDVIFFYRSNDVTQSCSSGRSTTIRVRCSPQKTVPGSLLLPGTCSDGTCDGCNFBFLWE SAAACPLCSVADYHAIVSSCVAGIQ corresponding to amino acids 1-452 of Q9P2M2_HUMAN (SEQ ID NO: 135), which also corresponds to amino acids 425-876 of H13410_P8 (SEQ ID NO: 140), and a third amino acid sequence being at least about 70%, optionally at least 80%, preferably at least 85%, more preferably at least 90% and most preferably at least 95% homologous to a polypeptide having the sequence VGFPLIGHFHERREWEI (SEQ ID NO: 500) corresponding to amino acids 877-893 of H13410_P8 (SEQ ID NO: 140), wherein said first amino acid sequence, second amino acid sequence and third amino acid sequence are contiguous and in a sequential order.

[1029] B. An isolated polypeptide encoding for a head of H13410_P8 (SEQ ID NO: 140), comprising a polypeptide being at least 70%, optionally at least about 80%, preferably at least about 85%, more preferably at least about 90% and most preferably at least about 95% homologous to the sequence

(SEQ ID NO: 502)

MAEPGHSHHLSARVRGRTERRIPRLWRLLLWAGTAFQVTQGTGPELHACK
ESEYHYEYTACDSTGSRWRVAVPHTPGLCTSLPDPVKGTECSFSCNAGEF
LDMKDQSCKPCAEGRYSLGTGIRFDEWDELPHGFASLSANMELDDSAAES
TGNCTSSKWVPRGDYIASNTDECTATLMYAVNLKQSGTVNFEYYYPDSSI
IFEFVQNDQCQPNADDSRWMKTTEKGWEFHSVELNRGNNVLYWRTTAFSV
WTKVPKPVLVRNIAITGVAYTSECFPCKPGTYADKQGSSFCKLCPANSYS
NKGETSCHQCDPDKYSEKGSSSCNVRPACTDKDYFYHTACDANGETQLMY
KWAKPKICSEDLEGAVKLPASGVKTHCPPCNPGFFKTNNSTCQPCPYGSY
SNGSDCTRCPAGTEPAVGFEYK
of

(SEQ ID NO: 140)

H13410_P8.

[1030] The localization of the variant protein was determined according to results from a number of different software programs and analyses, including analyses from SignalP and other specialized programs. The variant protein is believed to be secreted.

[1031] Variant protein H13410_P8 (SEQ ID NO: 140) also has the following non-silent SNPs (Single Nucleotide Polymorphisms) as listed in Table 65, (given according to their position(s) on the amino acid sequence, with the alternative amino acid(s) listed).

TABLE 65
Amino acid mutations

| SNP position(s) on amino acid | |
|---|---|
| sequence | Alternative amino acid(s) |
| 16 | G -> * |
| 16 | G -> R |
| 86 | V -> I |
| 623 | P -> T |

[1032] Variant protein H13410_P8 (SEQ ID NO: 140) is encoded by the following transcript(s): H13410_T27 (SEQ ID NO: 91), for which the coding portion starts at position 138 and ends at position 2816. The transcript also has the following SNPs as listed in Table 66 (given according to their position on the nucleotide sequence, with the alternative nucleic acid listed; H13410_P8 (SEQ ID NO: 140)).

TABLE 66
Nucleic acid SNPs

| | SNP position(s) on nucleotide |
|---|---|
| Polymorphism | sequence |
| G -> A | 183, 393 |
| G -> T | 183 |
| T -> C | 278, 2105, 2214 |
| C -> T | 1886, 2174, 3738 |
| C -> A | 2004 |
| A -> G | 2132, 2648 |
| C -> G | 3592 |
| C -> | 3592 |

[1033] Variant protein H13410_P9 (SEQ ID NO: 141) according to the present invention has an amino acid sequence as given in the “Sequence Listing” of the application; it is encoded by transcript(s) H13410_T18 (SEQ ID NO: 89). An alignment is given to the known protein (maba1 SEQ ID NOs:133-138) in the alignment table, on the attached CDROM. One or more alignments to one or more previously published protein sequences are given in the alignment table, on the attached CDROM. A brief description of the relationship of the variant protein according to the present invention to each such aligned protein is as follows:

### 1. Comparison Report Between H13410_P9 (SEQ ID NO: 141) and Q6UXG2_HUMAN (SEQ ID NO: 137):

[1034] A. An isolated chimeric polypeptide encoding for H13410_P9 (SEQ ID NO: 141), comprising a first amino acid sequence being at least about 90% homologous to MAEPGHSHHLSARVRGRTERRIPRLWRLLLWAGTAFQVTQGTGPELHACKESEYHYEYTACDSTGSRWR VAVPHTPGLCTSLPDPVKGTECSFSCNAGEFLDMKDQSCKPCAEGRYSLGTGIRFDEWDELPHGFASLSAN MELDDSAAESTGNCTSSKWVPRGDYIASNTDECTATLMYAVNLKQSGTVNFEYYYPDSSRIFEFFVQNDQ CQPNADDSRWMKTTEKGWEFHSVELNRGNNVLYWRTTAFSVWTKVPKPVLVRNIAITGVAYTSECFPCK PGTYADKQGSSFCKLCPANSYSNKGETSCHQCDPDKYSEKGSSSCNVRPACTDKDYFYTHTACDANGET QLMYKWAKPKICSEDLEGAVKLPASGVKTHCPPCNPGFFKTNNSTCQPCPYGSYSNGSDCTRCPAGTEPA VGFEYKWWNTLPTNMETTVLSGINFEYKGMTGWEVAGDHIYTAAGASDNDFMILTLVVPGFRPPQSVMA DTENKEVARITFVFETLCSVNCELYFMVGVNSRTNTPVETWKGSKGKQSYTYIIEENTTTSFTWAFQRTTF BEASRKYTNDVAKIYSINVTNVMNGVASYCRPCALEASDVGSSCTSCPAGYYIDRDSGTCHSCPPNTILKA HQPYGVQACVPCGPGTKNNKIHSLCYNDCTFSRNTPTRTFNYNFSALANTVTLAGGPSFTSKGLKYFHHFT LSLCGNQGRKMSVCTDNVTDLRIPEGESGFSKSITAYVCQAVIIPPEVTGYKAGVSSQPVSLADRLIGVTTD MTLDGITSPAELFHLESLGIPDVIFFYRSNDVTQSCSSGRSTTIRVRCSPQKTVPGSLLLPGTCSDGTCDGCN FHFLWESAAACPLCSVADYHAIVSSCVAGIQKTTYVWREPKLCSGGISLPEQRVTICKTIDFWLKVGISAGT CTAILLTVLTCYFWKKNQK corresponding to amino acids 1-936 of Q6UXG2_HUMAN (SEQ ID NO: 137), which also corresponds to amino acids 1-936 of H13410_P9 (SEQ ID NO: 141), and a second amino acid sequence being at least about 70%, optionally at least 80%, preferably at least 85%, more preferably at least 90% and most preferably at least 95% homologous to a polypeptide having the sequence YMLRYWSVGMDRVGLLIRENI (SEQ ID NO: 503) corresponding to amino acids 937-957 of H13410_P9 (SEQ ID NO: 141), wherein said first amino acid sequence and second amino acid sequence are contiguous and in a sequential order.

[1035] B. An isolated polypeptide encoding for an edge portion of H13410_P9 (SEQ ID NO: 141), comprising an amino acid sequence being at least about 70%, optionally at least about 80%, preferably at least about 85%, more preferably at least about 90% and most preferably at least about 95% homologous to the sequence YMLRYWSVGMDRVGLLIRENI (SEQ ID NO: 503) of H13410_P9 (SEQ ID NO: 141).

### 2. Comparison Report Between H13410_P9 (SEQ ID NO: 141) and NP_{—}065826 (SEQ ID NO:344):

[1036] A. An isolated chimeric polypeptide encoding for H13410_P9 (SEQ ID NO: 141), comprising a first amino acid sequence being at least about 90% homologous to

MAEPGHSHHLSARVRGRTERRIPRLWRLLLWAGTAFQVTQGTGPELHACK
ESEYHYEYTACDSTGSRWRVAVPHTPGLCTSLPDPVKGTECSFSCNAGEF
LDMKDQSCKPCAEGRYSLGTGIRFDEWDELPHGFASLSANMELDDSAAES
TGNCTSSKWVPRGDYIASNTDECTATLMYAVNLKQSGTVNFEYYYPDSSI
IFEFFVQNDQCQPNADDSRWMKTTEKGWEFHSVELNRGNNVLYWRTTAFS
VWTKVPKPVLVRNIAITGVAYTSECFPCKPGTYADKQGSSFCKLCPANSY
SNKGETSCHQCDPDKYSEKGSSSCNVRPACTDKDYFYTHTACDANGETQL
MYKWAKPKICSEDLEGAVKLPASGVKTHCPPCNPGFFKTNNSTCQPCPYG
SYSNGSDCTRCPAGTEPAVGFEYKWWNTLPTNMETTVLSGINFEYKGMTG
WEVAGDHIYTAAGASDNDFMILTLVVPGFRPPQSVMADTENKEVARITFV
FETLCSVNCELYFMVGVNSRTNTPVETWKGSKGKQSYTYIIEENTTTSFT
WAFQRTTFHEASRKYTNDVAKIYSINVTNVMNGVASYCRPCALEASDVGS
SCTSCPAGYYIDRDSGTCHSCP

corresponding to amino acids 1-622 of NP_{—}065826 (SEQ ID NO:344), which also corresponds to amino acids 1-622 of H13410_P9 (SEQ ID NO: 141), a bridging amino acid P corresponding to amino acid 623 of H13410_P9 (SEQ ID NO: 141), a second amino acid sequence being at least about 90% homologous to NTILKAHQPYGVQACVPCGPGTKNNKIHSLCYNDCTFSRNTPTRTFNYNFSALANTVTLAGGPSFTSKGLK YFHHFTLSLCGNQGRKMSVCTDNVTDLRIPEGESGFSKSITAYVCQAVIIPPEVTGYKAGVSSQPVSLADRL IGVTTDMTLDGITSPAELFHLESLGIPDVIFFYRSNDVTQSCSSGRSTTIRVRCSPQKTVPGSLLLPGTCSDGT CDGCNFHFLWESAAACPLCSVADYHAIVSSCVAGIQKTTYVWREPKLCSGGISLPEQRVTICKTIDFWLKV GISAGTCTAILLTVLTCYFWKKNQK corresponding to amino acids 624-936 of NP_{—}065826 (SEQ ID NO:344), which also corresponds to amino acids 624-936 of H13410_P9 (SEQ ID NO: 141), and a third amino acid sequence being at least about 70%, optionally at least 80%, preferably at least 85%, more preferably at least 90% and most preferably at least 95% homologous to a polypeptide having the sequence YMLRYWSVGMDRVGLLIRENI (SEQ ID NO: 503) corresponding to amino acids 937-957 of H13410_P9 (SEQ ID NO: 141), wherein said first amino acid sequence, bridging amino acid, second amino acid sequence and third amino acid sequence are contiguous and in a sequential order.

### 3. Comparison Report Between H13410_P9 (SEQ ID NO: 141) and Q8N1G3_HUMAN (SEQ ID NO: 136):

[1037] A. An isolated chimeric polypeptide encoding for H13410_P9 (SEQ ID NO: 141), comprising a first amino acid sequence being at least about 70%, optionally at least 80%, preferably at least 85%, more preferably at least 90% and most preferably at least 95%, homologous to a polypeptide having the sequence MAEPGHSHHLSARVRGRTERRIPRLWRLLLWAGTAFQVTQGTGPELHACKESEYHYEYTACDSTGSRWR VAVPHTPGLCTSLPDPVKGTECSFSCNAGEFLDMKDQSCKPCAEGRYSLGTGIRFDEWDELPHGFASLSAN MELDDSAAESTGNCTSSKWVPRGDYIASNTDECTATLMYAVNLKQSGTVNFEYYYPDSSIIFEFFVQNDQ CQPNADDSRWMKTTEKGWEFHSVELNRGNNVLYWRTTAFSVWTKVPKPVLVRNIAITGVAYTSECFPCK PGTYADKQGSSFCKLCPANSYSNKGETSCHQCDPDKYSEKGSSSCNVRPACTDKDYFYTHTACDANGET QL (SEQ ID NO: 501) corresponding to amino acids 1-350 of H13410_P9 (SEQ ID NO: 141), a second amino acid sequence being at least about 90% homologous to

(SEQ ID NO: 136)

MYKWAKPKICSEDLEGAVKLPASGVKTHCPPCNPGFFKTNNSTCQPCPYG
SYSNGSDCTRCPAGTEPAVGFEYKWWNTLPTNMETTVLSGINFEYKGMTG
WEVAGDHIYTAAGASDNDFMILTLVVPGFRPPQSVMADTENKEVARITFV
FETLCSVNCELYFMVGVNSRTNTPVETWKGSKGKQSYTYIIEENTTTSFT
WAFQRTTFHEASRKYTNDVAKIYSINVTNVMNGVASYCRPCALEASDVGS
SCTSCPAGYYIDRDSGTCHSCPPNTILKAHQPYGVQACVPCGPGTKNNKI
HSLCYNDCTFSRNTPTRTFNYNFSALANTVTLAGGPSFTSKGLKYFHHFT
LSLCGNQGRKMSVCTDNVTDLRIPEGESGFSKSITAYVCQAVIIPPEVTG
YKAGVSSQPVSLADRLIGVTTDMTLDGITSPAELFHLESLGIPDVIFFYR
SNDVTQSCSSGRSTTIRVRCSPQKTVPGSLLLPGTCSDGTCDGCNFHFLW
ESAAACPLCSVADYHAIVSSCVAGIQKTTYVWREPKLCSGGISLPEQRVT
ICKTIDFWLKVGISAGTCTAILLTVLTCYFWKKNQK
corresponding to amino acids 1-586 of
Q8N1G3_HUMAN,

which also corresponds to amino acids 351-936 of H13410_P9 (SEQ ID NO: 141), and a third amino acid sequence being at least about 70%, optionally at least 80%, preferably at least 85%, more preferably at least 90% and most preferably at least 95% homologous to a polypeptide having the sequence YMLRYWSVGMDRVGLLIRENI (SEQ ID NO: 503) corresponding to amino acids 937-957 of H13410_P9 (SEQ ID NO: 141), wherein said first amino acid sequence, second amino acid sequence and third amino acid sequence are contiguous and in a sequential order.

### 4. Comparison Report Between H13410_P9 (SEQ ID NO: 141) and Q5T5C9_HUMAN (SEQ ID NO: 138):

[1038] A. An isolated chimeric polypeptide encoding for H13410_P9 (SEQ ID NO: 141), comprising a first amino acid sequence being at least about 70%, optionally at least 80%, preferably at least 85%, more preferably at least 90% and most preferably at least 95%, homologous to a polypeptide having the sequence MAEPGHSHHLSARVRGRTERRIPRLWRLLLWAGTAFQVTQGTGPELIIACKESEYHYEYTACDSTGSRWR VAVPHTPGLCTSLPDPVKGTECSFSCNAGEFLDMKDQSCKPCAEGRYSLGTGIRFDEWDELPHGFASLSAN MELDDSAAESTGNCTSSKWVPRGDYIASNTDECTATLMYAVNLKQSGTVNFEYYYPDSSIIFEFFVQNDQ CQPNADDSRWMKTTEKGWEFHSVELNRGNNVLYWRTTAFSVWTKVPKPVLVRNIAITGVAYTSECFPCK PGTYADKQGSSFCKLCPANSYSNKGETSCHQCDPDKYSEKGSSSCNVRPACTDKDYFYTHTACDANGET QL (SEQ ID NO: 501) corresponding to amino acids 1-350 of H13410_P9 (SEQ ID NO: 141), a second amino acid sequence being at least about 90% homologous to MYKWAKPKICSEDLEGAVKLPASGVKTHCPPCNPGFFKTNNSTCQPCPYGSYSNGSDCTRCPAGTEPAVG FEYKWWNTLPTNMETTVLSGINFEYKGMTGWEVAGDHIYTAAGASDNDFMILTLVVPGFRPPQSVMADT ENKEVARITFVFETLCSVNCELYFMVGVNSRINTPVETWKGSKGKQSYTYIIEENTTTSFTWAFQRTTFHE ASRKYTNDVAKIYSINVTNVMNGVASYCRPCALEASDVGSSCTSCPAGYYIDRDSGTCHSCP corresponding to amino acids 1-272 of Q5T5C9_HUMAN (SEQ ID NO: 138), which also corresponds to amino acids 351-622 of H13410_P9 (SEQ ID NO: 141), a bridging amino acid P corresponding to amino acid 623 of H13410_P9 (SEQ ID NO: 141), a third amino acid sequence being at least about 90% homologous to NTILKAHQPYGVQACVPCGPGTKNNKIHSLCYNDCTFSRNTPTRTFNYNFSALANTVTLAGGPSFTSKGLK YFHHFTLSLCGNQGRKMSVCTDNVTDLRIPEGESGFSKSITAYVCQAVIIPPEVTGYKAGVSSQPVSLADRL IGVTTDMTLDGITSPAELFHLESLGIPDVIFFYRSNDVTQSCSSGRSTTIRVRCSPQKTVPGSLLLPGTCSDGT CDGCNFHFLWESAAACPLCSVADYHAIVSSCVAGIQKTTYVWREPKLCSGGISLPEQRVTICKTIDFWLKV GISAGTCTAILLTVLTCYFWKKNQK corresponding to amino acids 274-586 of Q5T5C9_HUMAN (SEQ ID NO: 138), which also corresponds to amino acids 624-936 of H13410_P9 (SEQ ID NO: 141), and a fourth amino acid sequence being at least about 70%, optionally at least 80%, preferably at least 85%, more preferably at least 90% and most preferably at least 95% homologous to a polypeptide having the sequence YMLRYWSVGMDRVGLLIRENI (SEQ ID NO: 503) corresponding to amino acids 937-957 of H13410_P9 (SEQ ID NO: 141), wherein said first amino acid sequence, second amino acid sequence, bridging amino acid, third amino acid sequence and fourth amino acid sequence are contiguous and in a sequential order.

### 5. Comparison Report Between H13410_P9 (SEQ ID NO: 141) and Q9P2M2_HUMAN (SEQ ID NO: 135):

[1039] A. An isolated chimeric polypeptide encoding for H13410_P9 (SEQ ID NO: 141), comprising a first amino acid sequence being at least about 70%, optionally at least 80%, preferably at least 85%, more preferably at least 90% and most preferably at least 95%, homologous to a polypeptide having the sequence MAEPGHSHHLSARVRGRTERRIPRLWRLLLWAGTAFQVTQGTGPELHACKESEYHYEYTACDSTGSRWR VAVPHTPGLCTSLPDPVKGTECSFSCNAGEFLDMKDQSCKPCAEGRYSLGTGIRFDEWDELPHGFASLSAN MELDDSAAESTGNCTSSKWVPRGDYIASNTDECTATLMYAVNLKQSGTVNFEYYYPDSSIIFEFFVQNDQ CQPNADDSRWMKTTEKGWEFHSVELNRGNNVLYWRTTAFSVWTKVPKPVLVRNIAITGVAYTSECFPCK PGTYADKQGSSFCKLCPANSYSNKGETSCHQCDPDKYSEKGSSSCNVRPACTDKDYFYTHTACDANGET QLMYKWAKPKICSEDLEGAVKLPASGVKTHCPPCNPGFFKTNNSTCQPCPYGSYSNGSDCTRCPAGTEPA VGFEYK (SEQ ID NO: 502) corresponding to amino acids 1-424 of H13410_P9 (SEQ ID NO: 141), a second amino acid sequence being at least about 90% homologous to WWNTLPTNMETTVLSGINFEYKGMTGWEVAGDHIYTAAGASDNDFMILTLVVPGFRPPQSVMADTENKE VARITFVFETLCSVNCELYFMVGVNSRfNTPVETWKGSKGKQSYTYIIEENTTTSFTWAFQRTTFHEASRK YTNDVAKIYSINVTNVMNGVASYCRPCALEASDVGSSCTSCPAGYYIDRDSGTCHSCPPNTILKAHQPYGV QACVPCGPGTKNNKIHSLCYNDCTFSRNTPTRTFNYNFSALANTVTLAGGPSFTSKGLKYFHIIFTLSLCGN QGRKMSVCTDNVTDLRIPEGESGPSKSITAYVCQAVIIPPEVTGYKAGVSSQPVSLADRLIGVTTDMTLDGI TSPAELFHLESLGIPDVIFFYRSNDVTQSCSSGRSTTIRVRCSPQKTVPGSLLLPGTCSDGTCDGCNFHFLWE SAAACPLCSVADYHAIVSSCVAGIQKTTYVWREPKLCSGGISLPEQRVTICKTIDFWLKVGISAGTCTAILL TVLTCYFWKKNQK corresponding to amino acids 1-512 of Q9P2M2_HUMAN (SEQ ID NO: 135), which also corresponds to amino acids 425-936 of H13410_P9 (SEQ ID NO: 141), and a third amino acid sequence being at least about 70%, optionally at least 80%, preferably at least 85%, more preferably at least 90% and most preferably at least 95% homologous to a polypeptide having the sequence YMLRYWSVGMDRVGLLIRENI (SEQ ID NO: 503) corresponding to amino acids 937-957 of H13410_P9 (SEQ ID NO: 141), wherein said first amino acid sequence, second amino acid sequence and third amino acid sequence are contiguous and in a sequential order.

[1040] B. An isolated polypeptide encoding for a head of H13410_P9 (SEQ ID NO: 141), comprising a polypeptide being at least 70%, optionally at least about 80%, preferably at least about 85%, more preferably at least about 90% and most preferably at least about 95% homologous to the sequence

(SEQ ID NO: 502)

MAEPGHSHHLSARVRGRTERRIPRILWRLLLWAGTAFQVTQGTGPELHAC
KESEYHYEYTACDSTGSRWRVAVPHTPGLCTSLPDPVKGTECSFSCNAGE
FLDMKDQSCKPCAEGRYSLGTGIRFDEWDELPHGFASLSANMELDDSAAE
STGNCTSSKWVPRGDYIASNTDECTATLMYAVNLKQSGTVNFEYYYPDSS
IIFEFFVQNDQCQPNADDSRWMKTTEKGWEFHSVELNRGNNVLYWRTTAF
SVWTKVPKPVLVRNIAITGVAYTSECFPCKPGTYADKQGSSFCKLCPANS
YSNKGETSCHQCDPDKYSEKGSSSCNVRPACTDKDYFYTHTACDANGETQ
LMYKWAKPKICSEDLEGAVKLPASGVKTHCPPCNPGFFKTNNSTCQPCPY
GSYSNGSDCTRCPAGTEPAVGFEYK
of

(SEQ ID NO: 141)

H13410_P9.

[1041] The localization of the variant protein was determined according to results from a number of different software programs and analyses, including analyses from SignalP and other specialized programs. The variant protein is believed to be membranal.

[1042] Variant protein H13410_P9 (SEQ ID NO: 141) also has the following non-silent SNPs (Single Nucleotide Polymorphisms) as listed in Table 67, (given according to their position(s) on the amino acid sequence, with the alternative amino acid(s) listed).

TABLE 67
Amino acid mutations

| SNP position(s) on amino acid | |
|---|---|
| sequence | Alternative amino acid(s) |
| 16 | G -> * |
| 16 | G -> R |
| 86 | V -> I |
| 623 | P -> T |

[1043] Variant protein H13410_P9 (SEQ ID NO: 141) is encoded by the following transcript(s): H13410_T18 (SEQ ID NO: 89), for which coding portion starts at position 138 and ends at position 3008. The transcript also has the following SNPs as listed in Table 68 (given according to their position on the nucleotide sequence, with the alternative nucleic acid listed; H13410_P9 (SEQ ID NO: 141)).

TABLE 68
Nucleic acid SNPs

| | SNP position(s) on nucleotide |
|---|---|
| Polymorphism | sequence |
| G -> A | 183, 393 |
| G -> T | 183 |
| T -> C | 278, 2105, 2214 |
| C -> T | 1886, 3660, 2174 |
| C -> A | 2004 |
| A -> G | 2132, 2648 |
| C -> G | 3514 |
| C -> | 3514 |

[1044] Variant protein H13410_P20 (SEQ ID NO: 142) according to the present invention has an amino acid sequence as given in the “Sequence Listing” of the application; it is encoded by transcript(s) H13410 T35 (SEQ ID NO: 92).

[1045] The localization of the variant protein was determined according to results from a number of different software programs and analyses, including analyses from SignalP and other specialized programs. The variant protein is believed to be secreted.

[1046] Variant protein H13410_P20 (SEQ ID NO: 142) also has the following non-silent SNPs (Single Nucleotide Polymorphisms) as listed in Table 69, (given according to their position(s) on the amino acid sequence, with the alternative amino acid(s) listed).

TABLE 69
Amino acid mutations

| SNP position(s) on amino acid | |
|---|---|
| sequence | Alternative amino acid(s) |
| 16 | G -> * |
| 16 | G -> R |
| 86 | V -> I |

[1047] Variant protein H13410_P20 (SEQ ID NO: 142) is encoded by the following transcript(s): H13410_T35 (SEQ ID NO: 92), for which the coding portion starts at position 138 and ends at position 704. The transcript also has the following SNPs as listed in Table 70 (given according to their position on the nucleotide sequence, with the alternative nucleic acid listed).

TABLE 70
Nucleic acid SNPs

| | SNP position(s) on nucleotide |
|---|---|
| Polymorphism | sequence |
| G -> A | 183, 393 |
| G -> T | 183 |
| T -> C | 278 |

[1048] Variant protein H13410_P46 (SEQ ID NO: 143) according to the present invention has an amino acid sequence as given in the “Sequence Listing” of the application; it is encoded by transcript(s) H13410_T8 (SEQ ID NO: 87).

[1049] The localization of the variant protein was determined according to results from a number of different software programs and analyses, including analyses from SignalP and other specialized programs. The variant protein is believed to be secreted.

[1050] Variant protein H13410_P46 (SEQ ID NO: 143) also has the following non-silent SNPs (Single Nucleotide Polymorphisms) as listed in Table 71, (given according to their position(s) on the amino acid sequence, with the alternative amino acid(s) listed).

TABLE 71
Amino acid mutations

| SNP position(s) on amino acid | |
|---|---|
| sequence | Alternative amino acid(s) |
| 16 | G -> * |
| 16 | G -> R |
| 86 | V -> I |

[1051] Variant protein H13410_P46 (SEQ ID NO: 143) is encoded by the following transcript(s): H13410_T8 (SEQ ID NO: 87), for which the coding portion starts at position 138 and ends at position 1649. The transcript also has the following SNPs as listed in Table 72 (given according to their position on the nucleotide sequence, with the alternative nucleic acid listed).

TABLE 72
Nucleic acid SNPs

| | SNP position(s) on nucleotide |
|---|---|
| Polymorphism | sequence |
| G -> A | 183, 393 |
| G -> T | 183 |
| T -> C | 278, 2310, 2201 |
| C -> T | 1982, 2270, 3259 |
| C -> A | 2100 |
| A -> G | 2228, 2744 |
| C -> G | 3113 |
| C -> | 3113 |

[1052] Variant protein H13410_P47 (SEQ ID NO: 144) according to the present invention has an amino acid sequence as given in the “Sequence Listing” of the application; it is encoded by transcript(s) H13410_T21 (SEQ ID NO: 90).

[1053] The localization of the variant protein was determined according to results from a number of different software programs and analyses, including analyses from SignalP and other specialized programs. The variant protein is believed to be secreted.

[1054] Variant protein H13410_P47 (SEQ ID NO: 144) also has the following non-silent SNPs (Single Nucleotide Polymorphisms) as listed in Table 73, (given according to their position(s) on the amino acid sequence, with the alternative amino acid(s) listed).

TABLE 73
Amino acid mutations

| SNP position(s) on amino acid | |
|---|---|
| sequence | Alternative amino acid(s) |
| 16 | G -> * |
| 16 | G -> R |
| 86 | V -> I |

[1055] Variant protein H13410_P47 (SEQ ID NO: 144) is encoded by the following transcript(s): H13410_T21 (SEQ ID NO: 90), for which the coding portion starts at position 138 and ends at position 1127. The transcript also has the following SNPs as listed in Table 74 (given according to their position on the nucleotide sequence, with the alternative nucleic acid listed).

TABLE 74
Nucleic acid SNPs

| | SNP position(s) on nucleotide |
|---|---|
| Polymorphism | sequence |
| G -> A | 183, 393 |
| G -> T | 183 |
| T -> C | 278, 2112, 2221 |
| C -> T | 1893, 3170, 2181 |
| C -> A | 2011 |
| A -> G | 2139, 2655 |
| C -> G | 3024 |
| C -> | 3024 |

[1056] As noted above, cluster H13410 features 40 segment(s), which were listed in Table 59 above and for which the sequence(s) are given in the “Sequence Listing” of the application. These segment(s) are portions of nucleic acid sequence(s) which are described herein separately because they are of particular interest. A description of some of these segments according to the present invention is now provided.

[1057] Segment cluster H134101N20 (SEQ ID NO: 97) according to the present invention is supported by 29 libraries. The number of libraries was determined as previously described. This segment can be found in the following transcript(s): H13410_T12 (SEQ ID NO: 88), H13410_T18 (SEQ ID NO: 89), H13410_T21 (SEQ ID NO: 90), H13410_T27 (SEQ ID NO: 91) and H13410_T8 (SEQ ID NO: 87). Table 75 below describes the starting and ending position of this segment on each transcript.

TABLE 75
Segment location on transcripts

| | Segment | Segment |
|---|---|---|
| Transcript name | starting position | ending position |
| H13410_T12 (SEQ ID NO: 88) | 940 | 1089 |
| H13410_T18 (SEQ ID NO: 89) | 940 | 1089 |
| H13410_T21 (SEQ ID NO: 90) | 940 | 1089 |
| H13410_T27 (SEQ ID NO: 91) | 940 | 1089 |
| H13410_T8 (SEQ ID NO: 87) | 940 | 1089 |

[1058] Segment cluster H13410_N27 (SEQ ID NO: 98) according to the present invention is supported by 40 libraries. The number of libraries was determined as previously described. This segment can be found in the following transcript(s): H13410_T12 (SEQ ID NO: 88), H13410_T18 (SEQ ID NO: 89), H13410_T21 (SEQ ID NO: 90), H13410_T27 (SEQ ID NO: 91) and H13410_T8 (SEQ ID NO: 87). Table 76 below describes the starting and ending position of this segment on each transcript.

TABLE 76
Segment location on transcripts

| | Segment | Segment |
|---|---|---|
| Transcript name | starting position | ending position |
| H13410_T12 (SEQ ID NO: 88) | 1179 | 1356 |
| H13410_T18 (SEQ ID NO: 89) | 1179 | 1356 |
| H13410_T21 (SEQ ID NO: 90) | 1090 | 1267 |
| H13410_T27 (SEQ ID NO: 91) | 1179 | 1356 |
| H13410_T8 (SEQ ID NO: 87) | 1179 | 1356 |

[1059] Segment cluster H13410_N36 (SEQ ID NO: 100) according to the present invention is supported by 1 libraries. The number of libraries was determined as previously described. This segment can be found in the following transcript(s): H13410_T12 (SEQ ID NO: 88). Table 77 below describes the starting and ending position of this segment on each transcript.

TABLE 77
Segment location on transcripts

| | Segment | Segment |
|---|---|---|
| Transcript name | starting position | ending position |
| H13410_T12 (SEQ ID NO: 88) | 1683 | 1936 |

[1060] Segment cluster H13410_N58 (SEQ ID NO: 106) according to the present invention is supported by 2 libraries. The number of libraries was determined as previously described. This segment can be found in the following transcript(s): H13410_T18 (SEQ ID NO: 89) and H13410_T27 (SEQ ID NO: 91). Table 78 below describes the starting and ending position of this segment on each transcript.

TABLE 78
Segment location on transcripts

| | Segment | Segment |
|---|---|---|
| Transcript name | starting position | ending position |
| H13410_T18 (SEQ ID NO: 89) | 2957 | 3441 |
| H13410_T27 (SEQ ID NO: 91) | 3035 | 3519 |

[1061] According to an optional embodiment of the present invention, short segments related to the above cluster are also provided. These segments are up to about 120 bp in length, and so are included in a separate description.

[1062] Segment cluster H13410_N12 (SEQ ID NO: 112) according to the present invention is supported by 1 libraries. The number of libraries was determined as previously described. This segment can be found in the following transcript(s): H13410_T35 (SEQ ID NO: 92). Table 79 below describes the starting and ending position of this segment on each transcript.

TABLE 79
Segment location on transcripts

| | Segment | Segment |
|---|---|---|
| Transcript name | starting position | ending position |
| H13410_T35 (SEQ ID NO: 92) | 605 | 723 |

[1063] Segment cluster H13410_N33 (SEQ ID NO: 117) according to the present invention is supported by 3 libraries. The number of libraries was determined as previously described. This segment can be found in the following transcript(s): H13410_T21 (SEQ ID NO: 90) and H13410_T8 (SEQ ID NO: 87). Table 80 below describes the starting and ending position of this segment on each transcript.

TABLE 80
Segment location on transcripts

| | Segment | Segment |
|---|---|---|
| Transcript name | starting position | ending position |
| H13410_T21 (SEQ ID NO: 90) | 1488 | 1583 |
| H13410_T8 (SEQ ID NO: 87) | 1577 | 1672 |

[1064] Segment cluster H13410_N55 (SEQ ID NO: 125) according to the present invention is supported by 2 libraries. The number of libraries was determined as previously described. This segment can be found in the following transcript(s): H13410T27 (SEQ ID NO: 91). Table 81 below describes the starting and ending position of this segment on each transcript.

TABLE 81
Segment location on transcripts

| | Segment | Segment |
|---|---|---|
| Transcript name | starting position | ending position |
| H13410_T27 (SEQ ID NO: 91) | 2766 | 2843 |

[1065] Expression of Homo sapiens maba1 (SEQ ID NO: 133) transcripts detectable by or according to the following segments was measured by real time PCR: seg10WTF2R2—H13410_seg10WTF2R2 (SEQ ID NO: 234) amplicon and primers H13410_seg10WTF2 (SEQ ID NO: 232) and H13410_seg10WTR2 (SEQ ID NO: 233); seg12—H13410_seg12 (SEQ ID NO: 237) amplicon and primers H13410_seg12F (SEQ ID NO: 235) and H13410_seg12R (SEQ ID NO: 236); seg33—H13410_seg33 (SEQ ID NO: 240) amplicon and primers H13410_seg33F (SEQ ID NO: 238) and H13410_seg33R (SEQ ID NO: 239); seg58—H13410_seg58 (SEQ ID NO: 243) amplicon and primers H13410_seg58F (SEQ ID NO: 241) and H13410_seg58R (SEQ ID NO: 242); junc20-27F2R2-H13410_junc20-27F2R2 (SEQ ID NO: 385) amplicon and primers H13410_junc20-27F2 (SEQ ID NO: 383) and H13410_junc20-27R2 (SEQ ID NO: 384). The sequences of corresponding primers and amplicans are given below:

Forward Primer H13410_seg10WTF2 (SEQ ID NO: 232):
CTACTCCCTCGGCACAGGC
Reverse Primer H13410_seg10WTR2 (SEQ ID NO: 233):
CAGCAGCACTGTCATCCAGC
Amplicon H13410_seg10WTF2R2 (SEQ ID NO: 234):
CTACTCCCTCGGCACAGGCATTCGGTTTGATGAGTGGGATGAGCTGCCCC
ATGGCTTTGCCAGCCTCTCAGCCAACATGGAGCTGGATGACAGTGCTGCT
G
Forward Primer H13410_seg12F (SEQ ID NO: 235):
ACGAGGAACTGGAAGCTCAGC
Reverse Primer H13410_seg12R (SEQ ID NO: 236):
AATGTGGCATTATGGAGCAGTG
Amplicon H13410_seg12 (SEQ ID NO: 237):
ACGAGGAACTGGAAGCTCAGCAAGGTTATGACCTGCTCTTTGTTATCCGG
TTTACAGCCGGCGAGATTGAAATTCGAACCCAAGCTTCCACTGCTCCATA
ATGCCACATT
Forward Primer H13410_seg33F (SEQ ID NO: 238))
GTCCCTGCTTCCCATCCCT
Reverse Primer H13410_seg33R (SEQ ID NO: 239):
CTTGCAAACACAGGCTTCATTC
Amplicon H13410_seg33 (SEQ ID NO: 240):
GTCCCTGCTTCCCATCCCTGGGATGTTGCTCAGTTTGCCTTCCCTTAACA
CACATTACTCAGAGCTAGCCAGATGAATGAAGCCTGTGTTTGCAAG
Forward Primer H13410_seg58F (SEQ ID NO: 241):
AAAGATCACTGAACTGGGAACTAAGAT
Reverse Primer H13410_seg58R (SEQ ID NO: 242):
GGTCCTATTCCCATGCCATG
Amplicon H13410_seg58 (SEQ ID NO: 243):
AAAGATCACTGAACTGGGAACTAAGATTCCTTCTATTACCCCAGCCCTGA
CACCATTTTACCATGCTTCAGTCTCCTTACCCATGGCATGGGAATAGGAC
C
Forward Primer H13410_junc20-27F2
(SEQ ID NO: 383)):
TTCTGCAAACTTTGCCCAGC
Reverse Primer H13410_junc20-27R2
(SEQ ID NO: 384)):
CCATTTGTACATGAGTTGTGTCTGAG
Amplicon H13410_junc20-27F2R2 (SEQ ID NO: 385)):
TTCTGCAAACTTTGCCCAGCCAACTCTTATTCAAATAAAGGAGAAACTTC
TTGCCACCAGTGTGACCCTGACAAATACTCAGACACAACTCATGTACAAA
TGG

Expression of Homo sapiens maba1 (SEQ ID NO: 133) (KIAA1324) H13410 Transcripts which are Detectable by Amplicon as Depicted in Sequence Name H13410_seg10WTF2R2 (SEQ ID NO: 234) in Normal and Cancerous Breast Tissues

[1066] Expression of Homo sapiens maba1 (KIAA1324) transcripts detectable by or according to seg10WTF2R2-H13410_seg10WTF2R2 (SEQ ID NO: 234) amplicon and primers H13410_seg10WTF2 (SEQ ID NO: 232) and H13410_seg10WTR2 (SEQ ID NO: 233) was measured by real time PCR on 2 breast RT panels: one panel (Table 1_{—}3) was checked for the expression of four housekeeping genes—G6PD (GenBank Accession No. NM_{—}000402 (SEQ ID NO:339); G6PD amplicon (SEQ ID NO: 311)), HPRT1 (GenBank Accession No. NM_{—}000194 (SEQ ID NO:337); amplicon—HPRT1-amplicon (SEQ ID NO: 305) (SEQ ID NO: 305)), PBGD (GenBank Accession No. BC019323 (SEQ ID NO:336); amplicon—PBGD-amplicon (SEQ ID NO: 302)) and SDHA (GenBank Accession No. NM_{—}004168 (SEQ ID NO:335); amplicon—SDHA-amplicon (SEQ ID NO:299)). Then, for each RT sample, the expression of the above amplicon was normalized to the geometric mean of the quantities of the housekeeping genes. The normalized quantity of each RT sample was then divided by the median of the quantities of the normal post-mortem (PM) samples (sample numbers 57, 59, 60, 63, 66, 64, 56, 65, 67 and 58, Table 1_{—}3 above), to obtain a value of fold up-regulation for each sample relative to the median of the normal PM samples. The second RT panel (Table 1_{—}7) was checked for the expression of the following housekeeping genes—G6PD (GenBank Accession No. NM_{—}000402 (SEQ ID NO:339); G6PD amplicon (SEQ ID NO: 311)), RPL19 (GenBank Accession No. NM_{—}000981 (SEQ ID NO:342); RPL19 amplicon (SEQ ID NO: 320)), PBGD (GenBank Accession No. BC019323 (SEQ ID NO:336); amplicon—PBGD-amplicon (SEQ ID NO: 302)) and SDHA (GenBank Accession No. NM_{—}004168 (SEQ ID NO:335); amplicon—SDHA-amplicon (SEQ ID NO:299)). Then, for each RT sample, the expression of the above amplicon was normalized to the normalization factor calculated from the expression of these house keeping genes as described in normalization method 2 in the “materials and methods” section. The normalized quantity of each RT sample was then divided by the median of the quantities of the normal samples (sample numbers 43, 45, 46, 47, 48, 49, 50, 51, 52, 54, 56, 58, 59, 60, 61, 62, 63, 64, 65, 66, 67, 68 and 69, Table 1_{—}7 above), to obtain a value of fold up-regulation for each sample relative to the median of the normal samples.

[1067] In one experiment with each panel no significant differential expression in the cancerous samples relative to the normal samples was observed.

[1068] Primer pairs are also optionally and preferably encompassed within the present invention; for example, for the above experiment, the following primer pair was used as a non-limiting illustrative example only of a suitable primer pair: H13410_seg10WTF2 (SEQ ID NO: 232) forward primer; and H13410_seg10WTR2 (SEQ ID NO: 233) reverse primer.

[1069] The present invention also preferably encompasses any amplicon obtained through the use of any suitable primer pair; for example, for the above experiment, the following amplicon was obtained as a non-limiting illustrative example only of a suitable amplicon: H13410_seg10WTF2R2 (SEQ ID NO: 234).

Expression of Homo sapiens maba1 (KIAA1324) H13410 Transcripts which are Detectable by Amplicon as Depicted in Sequence Name H13410_seg10WTF2R2 (SEQ ID NO: 234) in Normal and Cancerous Lung Tissues

[1070] Expression of Homo sapiens maba1 (KIAA1324) transcripts detectable by or according to seg10WTF2R2-H13410_seg10WTF2R2 (SEQ ID NO: 234) amplicon and primers H13410_seg10WTF2 (SEQ ID NO: 232) and H13410_seg10WTR2 (SEQ ID NO: 233) was measured by real time PCR. In parallel the expression of four housekeeping genes—HPRT1 (GenBank Accession No. NM_{—}000194 (SEQ ID NO:337); amplicon—HPRT1-amplicon (SEQ ID NO: 305) (SEQ ID NO: 305)), PBGD (GenBank Accession No. BC019323 (SEQ ID NO:336); amplicon—PBGD-amplicon (SEQ ID NO: 302)), SDHA (GenBank Accession No. NM_{—}004168 (SEQ ID NO:335); amplicon—SDHA-amplicon (SEQ ID NO:299)) and Ubiquitin (GenBank Accession No. BC000449 (SEQ ID NO:341); amplicon—Ubiquitin-amplicon (SEQ ID NO: 317)) was measured similarly. For each RT sample, the expression of the above amplicon was normalized to the normalization factor calculated from the expression of these house keeping genes as described in normalization method 2 in the “materials and methods” section. The normalized quantity of each RT sample was then divided by the median of the quantities of the normal samples (sample numbers 51, 52, 53, 54, 55, 56, 57, 58, 59, 60, 61, 62, 63, 64, 69 and 70, Table 1_{—}6 above), to obtain a value of fold up-regulation for each sample relative to the median of the normal samples.

[1071] FIG. 24 is a histogram showing over expression of the above-indicated Homo sapiens maba1 (KIAA1324) transcripts in cancerous Lung samples relative to the normal samples.

[1072] As is evident from FIG. 24, the expression of Homo sapiens maba1 (KIAA1324) transcripts detectable by the above amplicon in small cell carcinoma samples was significantly higher than in the non-cancerous samples (sample numbers 51, 52, 53, 54, 55, 56, 57, 58, 59, 60, 61, 62, 63, 64, 69 and 70, Table 1_{—}6 above) and was higher in a few non-small cell carcinoma samples than in the non-cancerous samples. Notably an over-expression of at least 5 fold was found in 4 out of 9 small cell carcinoma samples.

[1073] Statistical analysis was applied to verify the significance of these results, as described below.

[1074] The P value for the difference in the expression levels of Homo sapiens maba1 (KIAA1324) transcripts detectable by the above amplicon in Lung small cell carcinoma samples versus the normal tissue samples was determined by T test as 9.54e-003.

[1075] Threshold of 5 fold over expression was found to differentiate between small cell carcinoma and normal samples with P value of 9.96e-003 as checked by exact Fisher test.

[1076] The above values demonstrate statistical significance of the results.

[1077] Primer pairs are also optionally and preferably encompassed within the present invention; for example, for the above experiment, the following primer pair was used as a non-limiting illustrative example only of a suitable primer pair: H13410_seg10WTF2 (SEQ ID NO: 232) forward primer; and H13410_seg10WTR2 (SEQ ID NO: 233) reverse primer.

[1078] The present invention also preferably encompasses any amplicon obtained through the use of any suitable primer pair; for example, for the above experiment, the following amplicon was obtained as a non-limiting illustrative example only of a suitable amplicon: H13410_seg10WTF2R2 (SEQ ID NO: 234).

Expression of Homo sapiens maba1 H13410 Transcripts which are Detectable by Amplicon as Depicted in Sequence Name H13410_seg10WTF2R2 (SEQ ID NO: 234) in Normal and Cancerous Ovary Tissues

[1079] Expression of Homo sapiens maba1 transcripts detectable by or according to seg10WTF2R2-H13410_seg10WTF2R2 (SEQ ID NO: 234) amplicon and primers H13410_seg10WTF2 (SEQ ID NO: 232) and H13410_seg10WTR2 (SEQ ID NO: 233) was measured by real time PCR. In parallel the expression of four housekeeping genes—SDHA (GenBank Accession No. NM_{—}004168 (SEQ ID NO:335); amplicon—SDHA-amplicon (SEQ ID NO:299)), HPRT1 (GenBank Accession No. NM_{—}000194 (SEQ ID NO:337); amplicon —HPRT1-amplicon (SEQ ID NO: 305) (SEQ ID NO: 305)), PBGD (GenBank Accession No. BC019323 (SEQ ID NO:336); amplicon—PBGD-amplicon (SEQ ID NO: 302)) and GAPDH (GenBank Accession No. BC026907 (SEQ ID NO:338); GAPDH amplicon (SEQ ID NO: 308)) was measured similarly. For each RT sample, the expression of the above amplicon was normalized to the geometric mean of the quantities of the housekeeping genes. The normalized quantity of each RT sample was then divided by the median of the quantities of the normal post-mortem (PM) samples (sample numbers 45, 46, 71 and 48, Table 1_{—}1 above), to obtain a value of fold up-regulation for each sample relative to the median of the normal PM samples.

[1080] FIG. 25A is a histogram showing over expression of the Homo sapiens maba1 transcripts detectable by or according to H13410_seg10WTF2R2 (SEQ ID NO: 234) in cancerous Ovary samples relative to the normal samples.

[1081] As is evident from FIG. 25A, the expression of Homo sapiens maba1 transcripts detectable by the above amplicon in adenocarcinoma samples was higher than in the non-cancerous samples (sample numbers 45, 46, 71 and 48, Table 1_{—}1 above). Notably an over-expression of at least 5 fold was found in 20 out of 30 serous carcinoma samples and in 5 out of 6 mucinous carcinoma samples. Overall, there is over-expression in 30 samples out of 43 adenocarcinoma samples.

[1082] Statistical analysis was applied to verify the significance of these results, as described below.

[1083] The P value for the difference in the expression levels of Homo sapiens maba1 transcripts detectable by the above amplicon in Ovary adenocarcinoma samples versus the normal tissue samples was determined by T test as 1.25e-003.

[1084] The P value for the difference in the expression levels of Homo sapiens maba1 transcripts detectable by the above amplicon in Ovary serous carcinoma samples versus the normal tissue samples was determined by T test as 1.04e-002. The above values demonstrate statistical significance of the results.

[1085] Primer pairs are also optionally and preferably encompassed within the present invention; for example, for the above experiment, the following primer pair was used as a non-limiting illustrative example only of a suitable primer pair: H13410_seg10WTF2 (SEQ ID NO: 232) forward primer; and H13410_seg10WTR2 (SEQ ID NO: 233) reverse primer.

[1086] The present invention also preferably encompasses any amplicon obtained through the use of any suitable primer pair; for example, for the above experiment, the following amplicon was obtained as a non-limiting illustrative example only of a suitable amplicon: H13410_seg10WTF2R2 (SEQ ID NO: 234).

[1087] Expression of Homo sapiens maba1 (KIAA1324) transcripts detectable by or according to seg10WTF2R2-H13410_seg10WTF2R2 (SEQ ID NO: 234) amplicon and primers H13410_seg10WTF2 (SEQ ID NO: 232) and H13410_seg10WTR2 (SEQ ID NO: 233) was further measured by real time PCR using enlarged panel as shown in Table 1_{—}5. In parallel the expression of three housekeeping genes—SDHA (GenBank Accession No. NM_{—}004168 (SEQ ID NO:335); amplicon—SDHA-amplicon (SEQ ID NO:299)), HPRT1 (GenBank Accession No. NM_{—}000194 (SEQ ID NO:337); amplicon—HPRT1-amplicon (SEQ ID NO: 305) (SEQ ID NO: 305)) and G6PD (GenBank Accession No. NM_{—}000402 (SEQ ID NO:339); G6PD amplicon (SEQ ID NO: 311)) was measured similarly. For each RT sample, the expression of the above amplicon was normalized to the normalization factor calculated from the expression of these house keeping genes as described in normalization method 2 in the “materials and methods” section. The normalized quantity of each RT sample was then divided by the median of the quantities of the normal samples (sample numbers 52, 53, 54, 55, 56, 57, 58, 59, 60, 61, 62, 63, 64, 65, 66, 67, 68, 69, 70, 71, 72, 73, 74, 75, 76, 77 and 78, Table 1_{—}5 above), to obtain a value of fold up-regulation for each sample relative to the median of the normal samples.

[1088] FIGS. 25B and 25C are histograms showing over expression of the above-indicated Homo sapiens maba1 (KIAA1324) transcripts in cancerous Ovary samples relative to the normal samples. In FIG. 25B the samples are arranged according to the patient's age, and in FIG. 25C samples are arranged according to the patient's stage.

[1089] As is evident from FIGS. 25B and 25C, the expression of Homo sapiens maba1 (KIAA1324) transcripts detectable by the above amplicon in serous carcinoma, mucinous carcinoma and adenocarcinoma samples was significantly higher than in the non-cancerous samples (sample numbers 52, 53, 54, 55, 56, 57, 58, 59, 60, 61, 62, 63, 64, 65, 66, 67, 68, 69, 70, 71, 72, 73, 74, 75, 76, 77 and 78, Table 1_{—}5 above). Notably an over-expression of at least 5 fold was found in 47 out of 69 adenocarcinoma samples in 26 out of 43 serous carcinoma samples, in 10 out of 12 mucinous carcinoma samples and in 9 out of 10 endometroid samples. From FIG. 25B it can be observed that in serous samples over expression was mainly in patients with age below 50, in mucinus samples over expression was higher in patients with age below 50 and in endometroid over expression was mainly in patients with age above 50. From FIG. 25C it can be seen that in serous samples over expression was mainly in patients with stage I and II.

[1090] Statistical analysis was applied to verify the significance of these results, as described below.

[1091] The P value for the difference in the expression levels of Homo sapiens maba1 (KIAA1324) transcripts detectable by the above amplicon in Ovary adenocarcinoma samples versus the normal tissue samples was determined by T test as 1.70e-005. The P value for the difference in the expression levels of Homo sapiens maba1 (KIAA1324) transcripts detectable by the above amplicon in Ovary serous carcinoma samples versus the normal tissue samples was determined by T test as 2.18e-003. The P value for the difference in the expression levels of Homo sapiens maba1 (KIAA1324) transcripts detectable by the above amplicon in Ovary mucinous carcinoma samples versus the normal tissue samples was determined by T test as 3.94e-002. The P value for the difference in the expression levels of Homo sapiens maba1 (KIAA1324) transcripts detectable by the above amplicon in Ovary endometroid samples versus the normal tissue samples was determined by T test as 2.76e-002.

[1092] Threshold of 5 fold over expression was found to differentiate between adenocarcinoma and normal samples with P value of 3.06e-007 as checked by exact Fisher test. Threshold of 5 fold over expression was found to differentiate between serous carcinoma and normal samples with P value of 3.27e-005 as checked by exact Fisher test. Threshold of 5 fold over expression was found to differentiate between mucinous carcinoma and normal samples with P value of 2.40e-005 as checked by exact Fisher test. Threshold of 5 fold over expression was found to differentiate between endometroid and normal samples with P value of 1.58e-005 as checked by exact Fisher test.

[1093] The above values demonstrate statistical significance of the results.

[1094] Primer pairs are also optionally and preferably encompassed within the present invention; for example, for the above experiment, the following primer pair was used as a non-limiting illustrative example only of a suitable primer pair: H13410_seg10WTF2 (SEQ ID NO: 232) forward primer; and H13410_seg10WTR2 (SEQ ID NO: 233) reverse primer.

[1095] The present invention also preferably encompasses any amplicon obtained through the use of any suitable primer pair; for example, for the above experiment, the following amplicon was obtained as a non-limiting illustrative example only of a suitable amplicon: H13410_seg10WTF2R2 (SEQ ID NO: 234).

Expression of Homo sapiens Maba1 H13410 Transcripts which are Detectable by Amplicon as Depicted in Sequence Name H13410_seg10WTF2R2 (SEQ ID NO: 234) in Different Normal Tissues

[1096] Expression of Homo sapiens maba1 transcripts detectable by or according to seg10WTF2R2-H13410_seg10WTF2R2 (SEQ ID NO: 234) amplicon and primers H13410_seg10WTF2 (SEQ ID NO: 232) and H13410_seg10WTR2 (SEQ ID NO: 233) was measured by real time PCR. In parallel the expression of four housekeeping genes—SDHA (GenBank Accession No. NM_{—}004168 (SEQ ID NO:335); amplicon—SDHA-amplicon (SEQ ID NO:299)), Ubiquitin (GenBank Accession No. BC000449 (SEQ ID NO:341); amplicon—Ubiquitin-amplicon (SEQ ID NO: 317)), RPL19 (GenBank Accession No. NM_{—}000981 (SEQ ID NO:342); RPL19 amplicon (SEQ ID NO: 320)) and TATA box (GenBank Accession No. NM_{—}003194 (SEQ ID NO:343); TATA amplicon (SEQ ID NO: 323)) was measured similarly. For each RT sample, the expression of the above amplicon was normalized to the geometric mean of the quantities of the housekeeping genes. The normalized quantity of each RT sample was then divided by the median of the quantities of the breast samples (sample numbers 33, 34 and 35, Table 1_{—}9 above), to obtain a value of relative expression of each sample relative to the median of the breast samples. FIG. 26A shows expression of Homo sapiens maba1 H13410 transcripts which are detectable by amplicon as depicted in sequence name H13410_seg10WTF2R2 (SEQ ID NO: 234) in different normal tissues.

[1097] Expression of Homo sapiens maba1 (KIAA1324) transcripts detectable by or according to seg10WTF2R2-H13410_seg10WTF2R2 (SEQ ID NO: 234) amplicon and primers H13410_seg10WTF2R2F (SEQ ID NO: 232) and H13410_seg10WTF2R2R (SEQ ID NO: 233) was further measured by real time PCR using updated panel presented in table 1_{—}10. In parallel the expression of three housekeeping genes—SDHA (GenBank Accession No. NM_{—}004168 (SEQ ID NO:335); amplicon—SDHA-amplicon (SEQ ID NO:299)), Ubiquitin (GenBank Accession No. BC000449 (SEQ ID NO:341); amplicon—Ubiquitin-amplicon (SEQ ID NO: 317)), and TATA box (GenBank Accession No. NM_{—}003194 (SEQ ID NO:343); TATA amplicon (SEQ ID NO: 323)) was measured similarly. For each RT sample, the expression of the above amplicon was normalized to the normalization factor calculated from the expression of these house keeping genes as described in normalization method 2 in the “materials and methods” section. The normalized quantity of each RT sample was then divided by the median of the quantities of the breast samples (sample numbers 41, 42 and 43, Table 1_{—}10 above), to obtain a value of relative expression of each sample relative to the median of the breast samples—as presented in FIG. 26B, or to the median of the quantities of the ovary samples (sample numbers 31, 32, 33 and 34, Table 1_{—}10 above), to obtain a value of relative expression of each sample relative to the median of the ovary samples—as presented in FIG. 26C, or the median of the quantities of the lung samples (sample numbers 28, 29 and 30, Table 1_{—}10 above), to obtain a value of relative expression of each sample relative to the median of the lung samples—as presented in FIG. 26D.

[1098] FIG. 26 is a histogram showing expression of Homo sapiens maba1 (KIAA1324) H13410 transcripts which are detectable by amplicon as depicted in sequence name H13410_seg10WTF2R2 (SEQ ID NO: 234) in different normal tissues.

Expression of Homo sapiens maba1 H13410 Transcripts which are Detectable by Amplicon as Depicted in Sequence Name H13410_seg12 (SEQ ID NO: 237) in Normal and Cancerous Breast Tissues.

[1099] Expression of Homo sapiens maba1 transcripts detectable by or according to seg12-H13410_seg12 (SEQ ID NO: 237) amplicon and primers H13410_seg12F (SEQ ID NO: 235) and H13410_seg12R (SEQ ID NO: 236) was measured by real time PCR. In parallel the expression of four housekeeping genes—G6PD (GenBank Accession No. NM_{—}000402 (SEQ ID NO:339); G6PD amplicon (SEQ ID NO: 311)), HPRT1 (GenBank Accession No. NM_{—}000194 (SEQ ID NO:337); amplicon—HPRT1-amplicon (SEQ ID NO: 305) (SEQ ID NO: 305)), PBGD (GenBank Accession No. BC019323 (SEQ ID NO:336) (amplicon—PBGD-amplicon (SEQ ID NO: 302)) and SDHA (GenBank Accession No. NM_{—}004168 (SEQ ID NO:335); amplicon—SDHA-amplicon (SEQ ID NO:299)) was measured similarly. For each RT sample, the expression of the above amplicon was normalized to the geometric mean of the quantities of the housekeeping genes. The normalized quantity of each RT sample was then divided by the median of the quantities of the normal post-mortem (PM) samples (sample numbers 57, 59, 60, 63, 66, 64, 56, 65, 67 and 58, Table 1_{—}3 above: “Tissue samples in breast cancer testing panel”), to obtain a value of fold up-regulation for each sample relative to the median of the normal PM samples.

[1100] FIG. 27A is a histogram showing over expression of the Homo sapiens maba1 transcripts in cancerous Breast samples relative to the normal samples.

[1101] As is evident from FIG. 27A, the expression of Homo sapiens maba1 transcripts detectable by the above amplicon in cancer samples was significantly higher than in the non-cancerous samples (sample numbers 57, 59, 60, 63, 66, 64, 56, 65, 67 and 58, Table 1_{—}3 above: “Tissue samples in breast cancer testing panel”), especially in samples from patients with age above 50. Notably an over-expression of at least 5 fold was found in 17 out of 28 adenocarcinoma samples.

[1102] Statistical analysis was applied to verify the significance of these results, as described below.

[1103] The P value for the difference in the expression levels of Homo sapiens maba1 transcripts detectable by the above amplicon in Breast cancer samples versus the normal tissue samples was determined by T test as 2.24e-003.

[1104] Threshold of 5 fold over expression was found to differentiate between cancer and normal samples with P value of 7.46e-004 as checked by exact Fisher test.

[1105] The above values demonstrate statistical significance of the results.

[1106] Primer pairs are also optionally and preferably encompassed within the present invention; for example, for the above experiment, the following primer pair was used as a non-limiting illustrative example only of a suitable primer pair: H13410_seg12F (SEQ ID NO: 235) forward primer; and H13410_seg12R (SEQ ID NO: 236) reverse primer.

[1107] The present invention also preferably encompasses any amplicon obtained through the use of any suitable primer pair; for example, for the above experiment, the following amplicon was obtained as a non-limiting illustrative example only of a suitable amplicon: H13410_seg12 (SEQ ID NO: 237).

[1108] Expression of Homo sapiens maba1 (KIAA1324) transcripts detectable by or according to seg12-H13410_seg12 (SEQ ID NO: 237) amplicon and primers H13410_seg12F (SEQ ID NO: 235) and H13410_seg12R (SEQ ID NO: 236) was further measured by real time PCR using enlarged panel as shown in Table 1_{—}7. In parallel the expression of four housekeeping genes—G6PD (GenBank Accession No. NM_{—}000402 (SEQ ID NO:339); G6PD amplicon (SEQ ID NO: 311)), RPL19 (GenBank Accession No. NM_{—}000981 (SEQ ID NO:342); RPL19 amplicon (SEQ ID NO: 320)), PBGD (GenBank Accession No. BC019323 (SEQ ID NO:336); amplicon—PBGD-amplicon (SEQ ID NO: 302)) and SDHA (GenBank Accession No. NM_{—}004168 (SEQ ID NO:335); amplicon —SDHA-amplicon (SEQ ID NO:299)) was measured similarly. For each RT sample, the expression of the above amplicon was normalized to the normalization factor calculated from the expression of these house keeping genes as described in normalization method 2 in the “materials and methods” section. The normalized quantity of each RT sample was then divided by the median of the quantities of the normal samples (sample numbers 43, 45, 46, 47, 48, 49, 50, 51, 52, 54, 56, 58, 59, 60, 61, 62, 63, 64, 65, 66, 67, 68 and 69, Table 1_{—}7 above), to obtain a value of fold up-regulation for each sample relative to the median of the normal samples.

[1109] FIGS. 27B and 27C are a histograms showing over expression of the above-indicated Homo sapiens maba1 (KIAA1324) transcripts in cancerous Breast samples relative to the normal samples. In FIG. 27B—the cancer samples are arranged according to the stage of the cancer from the patient, and in FIG. 27C the samples are arranged according to patient's age.

[1110] As is evident from FIGS. 27B and 27C, the expression of Homo sapiens maba1 (KIAA1324) transcripts detectable by the above amplicon in cancer samples was significantly higher than in the non-cancerous samples (sample numbers 43, 45, 46, 47, 48, 49, 50, 51, 52, 54, 56, 58, 59, 60, 61, 62, 63, 64, 65, 66, 67, 68 and 69, Table 1_{—}7 above). Notably an over-expression of at least 3 fold was found in 25 out of 53 adenocarcinoma samples. From FIG. 27B it can be noted that expression was higher in samples from early stage patients—stages 1 and 2. From FIG. 27C it can be noted that expression is mainly higher in patients with age above 45.

[1111] Statistical analysis was applied to verify the significance of these results, as described below.

[1112] The P value for the difference in the expression levels of Homo sapiens maba1 (KIAA1324) transcripts detectable by the above amplicon in Breast cancer samples versus the normal tissue samples was determined by T test as 1.06e-003.

[1113] Threshold of 3 fold over expression was found to differentiate between cancer and normal samples with P value of 3.73e-003 as checked by exact Fisher test.

[1114] The above values demonstrate statistical significance of the results.

[1115] Primer pairs are also optionally and preferably encompassed within the present invention; for example, for the above experiment, the following primer pair was used as a non-limiting illustrative example only of a suitable primer pair: H13410_seg12F (SEQ ID NO: 235) forward primer; and H13410_seg12R (SEQ ID NO: 236) reverse primer.

[1116] The present invention also preferably encompasses any amplicon obtained through the use of any suitable primer pair; for example, for the above experiment, the following amplicon was obtained as a non-limiting illustrative example only of a suitable amplicon: H13410_seg12 (SEQ ID NO: 237).

Expression of Homo sapiens maba1 (KIAA1324) H13410 Transcripts which are Detectable by Amplicon as Depicted in Sequence name H13410_seg12 (SEQ ID NO: 237) in Normal and Cancerous Lung Tissues

[1117] Expression of Homo sapiens maba1 (KIAA1324) transcripts detectable by or according to seg12-H13410_seg12 (SEQ ID NO: 237) amplicon and primers H13410_seg12F (SEQ ID NO: 235) and H13410_seg12R (SEQ ID NO: 236) was measured by real time PCR. In parallel the expression of four housekeeping genes—HPRT1 (GenBank Accession No. NM_{—}000194 (SEQ ID NO:337); amplicon—HPRT1-amplicon (SEQ ID NO: 305) (SEQ ID NO: 305)), PBGD (GenBank Accession No. BC019323 (SEQ ID NO:336); amplicon—PBGD-amplicon (SEQ ID NO: 302)), SDHA (GenBank Accession No. NM_{—}004168 (SEQ ID NO:335); amplicon—SDHA-amplicon (SEQ ID NO:299)) and Ubiquitin (GenBank Accession No. BC000449 (SEQ ID NO:341); amplicon—Ubiquitin-amplicon (SEQ ID NO: 317)) was measured similarly. For each RT sample, the expression of the above amplicon was normalized to the normalization factor calculated from the expression of these house keeping genes as described in normalization method 2 in the “materials and methods” section. The normalized quantity of each RT sample was then divided by the median of the quantities of the normal samples (sample numbers 51, 52, 53, 54, 55, 56, 57, 58, 59, 60, 61, 62, 63, 64, 69 and 70, Table 1_{—}6 above), to obtain a value of fold up-regulation for each sample relative to the median of the normal samples.

[1118] FIG. 28 is a histogram showing over expression of the above-indicated Homo sapiens maba1 (KIAA1324) transcripts in cancerous Lung samples relative to the normal samples.

[1119] As is evident from FIG. 28, the expression of Homo sapiens maba1 (KIAA1324) transcripts detectable by the above amplicon in small cell carcinoma samples was significantly higher than in the non-cancerous samples (sample numbers 51, 52, 53, 54, 55, 56, 57, 58, 59, 60, 61, 62, 63, 64, 69 and 70, Table 1_{—}6 above) and was higher in a few non-small cell carcinoma samples than in the non-cancerous samples. Notably an over-expression of at least 5 fold was found in and in 6 out of 9 small cell carcinoma samples and in 8 out of 57 non-small cell carcinoma samples −3 out of 23 adenocarcinoma samples and in 5 out of 24 squamous cell carcinoma samples.

[1120] Statistical analysis was applied to verify the significance of these results, as described below.

[1121] The P value for the difference in the expression levels of Homo sapiens maba1 (KIAA1324) transcripts detectable by the above amplicon in Lung small cell carcinoma samples versus the normal tissue samples was determined by T test as 2.44e-002.

[1122] Threshold of 5 fold over expression was found to differentiate between small cell carcinoma and normal samples with P value of 2.85e-003 as checked by exact Fisher test.

[1123] The above values demonstrate statistical significance of the results.

[1124] Primer pairs are also optionally and preferably encompassed within the present invention; for example, for the above experiment, the following primer pair was used as a non-limiting illustrative example only of a suitable primer pair: H13410_seg12F (SEQ ID NO: 235) forward primer; and H13410_seg12R (SEQ ID NO: 236) reverse primer.

[1125] The present invention also preferably encompasses any amplicon obtained through the use of any suitable primer pair; for example, for the above experiment, the following amplicon was obtained as a non-limiting illustrative example only of a suitable amplicon: H13410_seg12 (SEQ ID NO: 237).

Expression of Homo sapiens maba1 (KIAA1324) H13410 Transcripts which are Detectable by Amplicon as Depicted in Sequence Name H13410_seg12 (SEQ ID NO: 237) in Normal and Cancerous Colon Tissues

[1126] Expression of Homo sapiens maba1 (KIAA1324) transcripts detectable by or according to seg12, H13410_seg12 (SEQ ID NO: 237) amplicon and primers H13410_seg12F (SEQ ID NO: 235) H13410_seg12R (SEQ ID NO: 236) was measured by real time PCR. In parallel the expression of three housekeeping genes—PBGD (GenBank Accession No. BC019323 (SEQ ID NO:336); amplicon—PBGD-amplicon (SEQ ID NO: 302)), HPRT1 (GenBank Accession No. NM_{—}000194 (SEQ ID NO:337); amplicon—BPRT1-amplicon (SEQ ID NO: 305) (SEQ ID NO: 305)) and G6PD (GenBank Accession No. NM_{—}000402 (SEQ ID NO:339); G6PD amplicon (SEQ ID NO: 311)) was measured similarly. For each RT sample, the expression of the above amplicon was normalized to normalization factor calculated from the expression of these house keeping genes as described in normalization method 2 in the “materials and methods” section. The normalized quantity of each RT sample was then divided by the median of the quantities of the normal samples (Sample Nos. 52, 42, 43, 44, 45, 46, 47, 48, 49, 50, 51, 53, 54, 55, 56, 57, 58, 59, 60, 61, 62, 63 and 64, Table 1_{—}8, above), to obtain a value of fold differential expression for each sample relative to the median of the normal samples.

[1127] In one experiment that was carried out no differential expression in the cancerous samples relative to the normal samples was observed.

[1128] Primer pairs are also optionally and preferably encompassed within the present invention; for example, for the above experiment, the following primer pair was used as a non-limiting illustrative example only of a suitable primer pair: H13410_seg12F (SEQ ID NO: 235) forward primer; and H13410_seg12R (SEQ ID NO: 236) reverse primer.

[1129] The present invention also preferably encompasses any amplicon obtained through the use of any suitable primer pair; for example, for the above experiment, the following amplicon was obtained as a non-limiting illustrative example only of a suitable amplicon: H13410_seg12 (SEQ ID NO: 237).

Expression of Homo sapiens maba1 H13410 transcripts which are detectable by amplicon as depicted in sequence name H13410_seg33 (SEQ ID NO: 240) in normal and cancerous breast tissues.

[1130] Expression of Homo sapiens maba1 transcripts detectable by or according to seg33—H13410_seg33 (SEQ ID NO: 240) amplicon and primers H13410 seg33F (SEQ ID NO: 238) and H13410_seg33R (SEQ ID NO: 239) was measured by real time PCR. In parallel the expression of four housekeeping genes—G6PD (GenBank Accession No. NM_{—}000402 (SEQ ID NO:339); G6PD amplicon (SEQ ID NO: 311)), HPRT1 (GenBank Accession No. NM_{—}000194 (SEQ ID NO:337); amplicon—HPRT1-amplicon (SEQ ID NO: 305) (SEQ ID NO: 305)), PBGD (GenBank Accession No. BC019323 (SEQ ID NO:336); amplicon—PBGD-amplicon (SEQ ID NO: 302)) and SDHA (GenBank Accession No. NM_{—}004168 (SEQ ID NO:335); amplicon—SDHA-amplicon (SEQ ID NO:299)) was measured similarly. For each RT sample, the expression of the above amplicon was normalized to the geometric mean of the quantities of the housekeeping genes. The normalized quantity of each RT sample was then divided by the median of the quantities of the normal post-mortem (PM) samples (sample numbers 57, 59, 60, 63, 66, 64, 56, 65, 67 and 58, Table 1_{—}3 above: “Tissue samples in breast cancer testing panel”), to obtain a value of fold up-regulation for each sample relative to the median of the normal PM samples.

[1131] FIG. 29A is a histogram showing over expression of the Homo sapiens maba1 transcripts in cancerous Breast samples relative to the normal samples.

[1132] As is evident from FIG. 29A, the expression of Homo sapiens maba1 transcripts detectable by the above amplicon in cancer samples was significantly higher than in the non-cancerous samples (sample numbers 57, 59, 60, 63, 66, 64, 56, 65, 67 and 58, Table 1_{—}3 above, “Tissue samples in breast cancer testing panel”). Notably an over-expression of at least 5 fold was found in 17 out of 28 adenocarcinoma samples.

[1133] Statistical analysis was applied to verify the significance of these results, as described below.

[1134] The P value for the difference in the expression levels of Homo sapiens maba1 transcripts detectable by the above amplicon in Breast cancer samples versus the normal tissue samples was determined by T test as 1.54e-004.

[1135] Threshold of 5 fold over expression was found to differentiate between cancer and normal samples with P value of 7.46e-004 as checked by exact Fisher test.

[1136] The above values demonstrate statistical significance of the results.

[1137] Primer pairs are also optionally and preferably encompassed within the present invention; for example, for the above experiment, the following primer pair was used as a non-limiting illustrative example only of a suitable primer pair: H13410_seg33F (SEQ ID NO: 238) forward primer; and H13410_seg33R (SEQ ID NO: 239) reverse primer.

[1138] The present invention also preferably encompasses any amplicon obtained through the use of any suitable primer pair; for example, for the above experiment, the following amplicon was obtained as a non-limiting illustrative example only of a suitable amplicon: H13410_seg33 (SEQ ID NO: 240).

[1139] Expression of Homo sapiens maba1 (KIAA1324) transcripts detectable by or according to seg33-H13410 seg33 (SEQ ID NO: 240) amplicon and primers H13410_seg33F (SEQ ID NO: 238) and H13410_seg33R (SEQ ID NO: 239) was further measured by real time PCR using enlarged panel as shown in Table 1_{—}7. In parallel the expression of four housekeeping genes—G6PD (GenBank Accession No. NM_{—}000402 (SEQ ID NO:339); G6PD amplicon (SEQ ID NO: 311)), RPL19 (GenBank Accession No. NM_{—}000981 (SEQ ID NO:342); RPL19 amplicon (SEQ ID NO: 320)), PBGD (GenBank Accession No. BC019323 (SEQ ID NO:336); amplicon—PBGD-amplicon (SEQ ID NO: 302)) and SDHA (GenBank Accession No. NM_{—}004168 (SEQ ID NO:335); amplicon—SDHA-amplicon (SEQ ID NO:299)) was measured similarly. For each RT sample, the expression of the above amplicon was normalized to the normalization factor calculated from the expression of these house keeping genes as described in normalization method 2 in the “materials and methods” section. The normalized quantity of each RT sample was then divided by the median of the quantities of the normal samples (sample numbers 43, 45, 46, 47, 48, 49, 50, 51, 52, 54, 56, 58, 59, 60, 61, 62, 63, 64, 65, 66, 67, 68 and 69, Table 1_{—}7 above), to obtain a value of fold up-regulation for each sample relative to the median of the normal samples.

[1140] FIG. 29B is a histogram showing over expression of the above-indicated Homo sapiens maba1 (KIAA1324) transcripts in cancerous Breast samples relative to the normal samples.

[1141] As is evident from FIG. 29B, the expression of Homo sapiens maba1 (KIAA1324) transcripts detectable by the above amplicon in cancer samples was higher than in the non-cancerous samples (sample numbers 43, 45, 46, 47, 48, 49, 50, 51, 52, 54, 56, 58, 59, 60, 61, 62, 63, 64, 65, 66, 67, 68 and 69, Table 1_{—}7 above). Notably an over-expression of at least 3 fold was found in 13 out of 53 adenocarcinoma samples.

[1142] Statistical analysis was applied to verify the significance of these results, as described below.

[1143] The P value for the difference in the expression levels of Homo sapiens maba1 (KIAA1324) transcripts detectable by the above amplicon in Breast cancer samples versus the normal tissue samples was determined by T test as 1.54e-002.

[1144] The above values demonstrate statistical significance of the results.

[1145] Primer pairs are also optionally and preferably encompassed within the present invention; for example, for the above experiment, the following primer pair was used as a non-limiting illustrative example only of a suitable primer pair: H13410_seg33F (SEQ ID NO: 238) forward primer; and H13410_seg33R (SEQ ID NO: 239) reverse primer.

[1146] The present invention also preferably encompasses any amplicon obtained through the use of any suitable primer pair; for example, for the above experiment, the following amplicon was obtained as a non-limiting illustrative example only of a suitable amplicon: H13410_seg33 (SEQ ID NO: 240).

Expression of Homo sapiens maba1 (KIAA1324) H13410 Transcripts which are Detectable by Amplicon as Depicted in Sequence Name H13410_seg33 (SEQ ID NO: 240) in Normal and Cancerous Lung Tissues

[1147] Expression of Homo sapiens maba1 (KIAA1324) transcripts detectable by or according to seg33-H13410_seg33 (SEQ ID NO: 240) amplicon and primers H13410_seg33F (SEQ ID NO: 238) and H13410_seg33R (SEQ ID NO: 239) was measured by real time PCR. In parallel the expression of four housekeeping genes—HPRT1 (GenBank Accession No. NM_{—}000194 (SEQ ID NO:337); amplicon—HPRT1-amplicon (SEQ ID NO: 305) (SEQ ID NO: 305)), PBGD (GenBank Accession No. BC019323 (SEQ ID NO:336); amplicon—PBGD-amplicon (SEQ ID NO: 302)), SDHA (GenBank Accession No. NM_{—}004168 (SEQ ID NO:335); amplicon—SDHA-amplicon (SEQ ID NO:299)) and Ubiquitin (GenBank Accession No. BC000449 (SEQ ID NO:341); amplicon—Ubiquitin-amplicon (SEQ ID NO: 317)) was measured similarly. For each RT sample, the expression of the above amplicon was normalized to the normalization factor calculated from the expression of these house keeping genes as described in normalization method 2 in the “materials and methods” section. The normalized quantity of each RT sample was then divided by the median of the quantities of the normal samples (sample numbers 51, 52, 53, 54, 55, 56, 57, 58, 59, 60, 61, 62, 63, 64, 69 and 70, Table 1_{—}6 above), to obtain a value of fold up-regulation for each sample relative to the median of the normal samples.

[1148] FIG. 30 is a histogram showing over expression of the above-indicated Homo sapiens maba1 (KIAA1324) transcripts in cancerous Lung samples relative to the normal samples.

[1149] As is evident from FIG. 30, the expression of Homo sapiens maba1 (KIAA1324) transcripts detectable by the above amplicon in small cell carcinoma samples was significantly higher than in the non-cancerous samples (sample numbers 51, 52, 53, 54, 55, 56, 57, 58, 59, 60, 61, 62, 63, 64, 69 and 70, Table 1_{—}6 above) and was higher in a few non-small cell carcinoma samples than in the non-cancerous samples. Notably an over-expression of at least 5 fold was found in 4 out of 9 small cell carcinoma samples and in 8 out of 58 non-small cell carcinoma samples −4 out of 24 adenocarcinoma samples and in 4 out of 24 squamous cell carcinoma samples.

[1150] Statistical analysis was applied to verify the significance of these results, as described below.

[1151] The P value for the difference in the expression levels of Homo sapiens maba1 (KIAA1324) transcripts detectable by the above amplicon in Lung small cell carcinoma samples versus the normal tissue samples was determined by T test as 1.49e-002. The P value for the difference in the expression levels of Homo sapiens maba1 (KIAA1324) transcripts detectable by the above amplicon in Lung non-small cell carcinoma samples versus the normal tissue samples was determined by T test as 1.91e-002. The P value for the difference in the expression levels of Homo sapiens maba1 (KIAA1324) transcripts detectable by the above amplicon in Lung adenocarcinoma samples versus the normal tissue samples was determined by T test as 4.59e-002. The P value for the difference in the expression levels of Homo sapiens maba1 (KIAA1324) transcripts detectable by the above amplicon in Lung squamous cell carcinoma samples versus the normal tissue samples was determined by T test as 7.72e-002.

[1152] Threshold of 5 fold over expression was found to differentiate between small cell carcinoma and normal samples with P value of 9.96e-003 as checked by exact Fisher test.

[1153] The above values demonstrate statistical significance of the results.

[1154] Primer pairs are also optionally and preferably encompassed within the present invention; for example, for the above experiment, the following primer pair was used as a non-limiting illustrative example only of a suitable primer pair: H13410_seg33F (SEQ ID NO: 238) forward primer; and H13410_seg33R (SEQ ID NO: 239) reverse primer.

[1155] The present invention also preferably encompasses any amplicon obtained through the use of any suitable primer pair; for example, for the above experiment, the following amplicon was obtained as a non-limiting illustrative example only of a suitable amplicon: H13410_seg33 (SEQ ID NO: 240).

Expression of Homo sapiens maba1 (KIAA1324) H13410 Transcripts which are Detectable by Amplicon as Depicted in Sequence Name H13410_seg33 (SEQ ID NO: 240) in Normal and Cancerous Colon Tissues

[1156] Expression of Homo sapiens maba1 (KIAA1324) transcripts detectable by or according to seg33, H13410_seg33 (SEQ ID NO: 240) amplicon and primers H13410_seg33F (SEQ ID NO: 238) H13410_seg33R (SEQ ID NO: 239) was measured by real time PCR. In parallel the expression of three housekeeping genes—PBGD (GenBank Accession No. BC019323 (SEQ ID NO:336); amplicon—PBGD-amplicon (SEQ ID NO: 302)), HPRT1 (GenBank Accession No. NM_{—}000194 (SEQ ID NO:337); amplicon—HPRT1-amplicon (SEQ ID NO: 305) (SEQ ID NO: 305)) and G6PD (GenBank Accession No. NM_{—}000402 (SEQ ID NO:339); G6PD amplicon (SEQ ID NO: 311)) was measured similarly. For each RT sample, the expression of the above amplicon was normalized to normalization factor calculated from the expression of these house keeping genes as described in normalization method 2 in the “materials and methods” section. The normalized quantity of each RT sample was then divided by the median of the quantities of the normal samples (Sample Nos. 52, 42, 43, 44, 45, 46, 47, 48, 49, 50, 51, 53, 54, 55, 56, 57, 58, 59, 60, 61, 62, 63 and 64, Table 1_{—}8, above), to obtain a value of fold differential expression for each sample relative to the median of the normal samples.

[1157] In one experiment that was carried out no differential expression in the cancerous samples relative to the normal samples was observed.

[1158] Primer pairs are also optionally and preferably encompassed within the present invention; for example, for the above experiment, the following primer pair was used as a non-limiting illustrative example only of a suitable primer pair: H13410_seg33F (SEQ ID NO: 238) forward primer; and H13410_seg33R (SEQ ID NO: 239) reverse primer.

[1159] The present invention also preferably encompasses any amplicon obtained through the use of any suitable primer pair; for example, for the above experiment, the following amplicon was obtained as a non-limiting illustrative example only of a suitable amplicon: H13410_seg33 (SEQ ID NO: 240).

Expression of Homo sapiens Maba1 H13410 Transcripts which are Detectable by Amplicon as Depicted in Sequence Name H13410_seg58 (SEQ ID NO: 243) in Normal and Cancerous Breast Tissues.

[1160] Expression of Homo sapiens maba1 transcripts detectable by or according to seg58—H13410_seg58 (SEQ ID NO: 243) amplicon and primers H13410_seg58F (SEQ ID NO: 241) and H13410_seg58R (SEQ ID NO: 242) was measured by real time PCR. In parallel the expression of four housekeeping genes—G6PD (GenBank Accession No. NM_{—}000402 (SEQ ID NO:339); G6PD amplicon (SEQ ID NO: 311)), HPRT1 (GenBank Accession No. NM_{—}000194 (SEQ ID NO:337); amplicon—HPRT1-amplicon (SEQ ID NO: 305) (SEQ ID NO: 305)), PBGD (GenBank Accession No. BC019323 (SEQ ID NO:336); amplicon—PBGD-amplicon (SEQ ID NO: 302)) and SDHA (GenBank Accession No. NM_{—}004168 (SEQ ID NO:335); amplicon—SDHA-amplicon (SEQ ID NO:299) ( ) was measured similarly. For each RT sample, the expression of the above amplicon was normalized to the geometric mean of the quantities of the housekeeping genes. The normalized quantity of each RT sample was then divided by the median of the quantities of the normal post-mortem (PM) samples (sample numbers 57, 59, 60, 63, 66, 64, 56, 65, 67 and 58, Table 1_{—}3 above: “Tissue samples in breast cancer testing panel”), to obtain a value of fold up-regulation for each sample relative to the median of the normal PM samples.

[1161] FIG. 31A is a histogram showing over expression of the Homo sapiens maba1 transcripts in cancerous Breast samples relative to the normal samples.

[1162] As is evident from FIG. 31A, the expression of Homo sapiens maba1 transcripts detectable by the above amplicon in cancer samples was significantly higher than in the non-cancerous samples (sample numbers 57, 59, 60, 63, 66, 64, 56, 65, 67 and 58, Table 1_{—}3 above: “Tissue samples in breast cancer testing panel”), especially in samples from patients with age above 50. Notably an over-expression of at least 5 fold was found in 20 out of 28 adenocarcinoma samples.

[1163] Statistical analysis was applied to verify the significance of these results, as described below.

[1164] The P value for the difference in the expression levels of Homo sapiens maba1 transcripts detectable by the above amplicon in Breast cancer samples versus the normal tissue samples was determined by T test as 6.61e-004.

[1165] Threshold of 5 fold over expression was found to differentiate between cancer and normal samples with P value of 1.12e-003 as checked by exact Fisher test.

[1166] The above values demonstrate statistical significance of the results.

[1167] Primer pairs are also optionally and preferably encompassed within the present invention; for example, for the above experiment, the following primer pair was used as a non-limiting illustrative example only of a suitable primer pair: H13410_seg58F (SEQ ID NO: 241) forward primer; and H13410_seg58R (SEQ ID NO: 242) reverse primer.

[1168] The present invention also preferably encompasses any amplicon obtained through the use of any suitable primer pair; for example, for the above experiment, the following amplicon was obtained as a non-limiting illustrative example only of a suitable amplicon: H13410_seg58 (SEQ ID NO: 243).

[1169] Expression of Homo sapiens maba1 (KIAA1324) transcripts detectable by or according to seg58-H13410_seg58 (SEQ ID NO: 243) amplicon and primers H13410_seg58F (SEQ ID NO: 241) and H13410_seg58R (SEQ ID NO: 242) was further measured by real time PCR using enlarged panel as shown in Table 1_{—}7. In parallel the expression of four housekeeping genes—G6PD (GenBank Accession No. NM_{—}000402 (SEQ ID NO:339); G6PD amplicon (SEQ ID NO: 311)), RPL19 (GenBank Accession No. NM_{—}000981 (SEQ ID NO:342); RPL19 amplicon (SEQ ID NO: 320)), PBGD (GenBank Accession No. BC019323 (SEQ ID NO:336); amplicon—PBGD-amplicon (SEQ ID NO: 302)) and SDHA (GenBank Accession No. NM_{—}004168 (SEQ ID NO:335); amplicon—SDHA-amplicon (SEQ ID NO:299)) was measured similarly. For each RT sample, the expression of the above amplicon was normalized to the normalization factor calculated from the expression of these house keeping genes as described in normalization method 2 in the “materials and methods” section. The normalized quantity of each RT sample was then divided by the median of the quantities of the normal samples (sample numbers 43, 45, 46, 47, 48, 49, 50, 51, 52, 54, 56, 58, 59, 60, 61, 62, 63, 64, 65, 66, 67, 68 and 69, Table 1_{—}7 above), to obtain a value of fold up-regulation for each sample relative to the median of the normal samples.

[1170] FIGS. 31B and 31C are histograms showing over expression of the above-indicated Homo sapiens maba1 (KIAA1324) transcripts in cancerous Breast samples relative to the normal samples. In FIG. 31B—the cancer samples are arranged according to the stage of the cancer from the patient, and in FIG. 31C the samples are arranged according to patient's age.

[1171] As is evident from FIGS. 31B and 31C, the expression of Homo sapiens maba1 (KIAA1324) transcripts detectable by the above amplicon in cancer samples was significantly higher than in the non-cancerous samples (sample numbers 43, 45, 46, 47, 48, 49, 50, 51, 52, 54, 56, 58, 59, 60, 61, 62, 63, 64, 65, 66, 67, 68 and 69, Table 1_{—}7 above). Notably an over-expression of at least 3 fold was found in 25 out of 53 adenocarcinoma samples. From FIG. 31B it can be noted that expression was higher in samples from early stage patients—stages 1 and 2. From FIG. 31C it can be noted that there is some correlation between expression level and patient's age.

[1172] Statistical analysis was applied to verify the significance of these results, as described below.

[1173] The P value for the difference in the expression levels of Homo sapiens maba1 (KIAA1324) transcripts detectable by the above amplicon in Breast cancer samples versus the normal tissue samples was determined by T test as 4.76e-004.

[1174] Threshold of 3 fold over expression was found to differentiate between cancer and normal samples with P value of 1.20e-002 as checked by exact Fisher test.

[1175] The above values demonstrate statistical significance of the results.

[1176] Primer pairs are also optionally and preferably encompassed within the present invention; for example, for the above experiment, the following primer pair was used as a non-limiting illustrative example only of a suitable primer pair: H13410_seg58F (SEQ ID NO: 241) forward primer; and H13410_seg58R (SEQ ID NO: 242) reverse primer.

[1177] The present invention also preferably encompasses any amplicon obtained through the use of any suitable primer pair; for example, for the above experiment, the following amplicon was obtained as a non-limiting illustrative example only of a suitable amplicon: H13410_seg58 (SEQ ID NO: 243).

Expression of Homo sapiens maba1 (KIAA1324) H13410 transcripts which are detectable by amplicon as depicted in sequence name H13410_seg58 (SEQ ID NO: 243) in normal and cancerous Lung tissues Expression of Homo sapiens maba1 (KIAA1324) transcripts detectable by or according to seg58-H13410_seg58 (SEQ ID NO: 243) amplicon and primers H13410_seg58F (SEQ ID NO: 241) and H13410_seg58R (SEQ ID NO: 242) was measured by real time PCR. In parallel the expression of four housekeeping genes—HPRT1 (GenBank Accession No. NM_{—}000194 (SEQ ID NO:337); amplicon—HPRT1-amplicon (SEQ ID NO: 305) (SEQ ID NO: 305)), PBGD (GenBank Accession No. BC019323 (SEQ ID NO:336); amplicon—PBGD-amplicon (SEQ ID NO: 302)), SDHA (GenBank Accession No. NM_{—}004168 (SEQ ID NO:335); amplicon—SDHA-amplicon (SEQ ID NO:299)) and Ubiquitin (GenBank Accession No. BC000449 (SEQ ID NO:341); amplicon—Ubiquitin-amplicon (SEQ ID NO: 317)) was measured similarly. For each RT sample, the expression of the above amplicon was normalized to the normalization factor calculated from the expression of these house keeping genes as described in normalization method 2 in the “materials and methods” section. The normalized quantity of each RT sample was then divided by the median of the quantities of the normal samples (sample numbers 51, 52, 53, 54, 55, 56, 57, 58, 59, 60, 61, 62, 63, 64, 69 and 70, Table 1_{—}6 above), to obtain a value of fold up-regulation for each sample relative to the median of the normal samples.

[1178] FIG. 32 is a histogram showing over expression of the above-indicated Homo sapiens maba1 (KIAA1324) transcripts in cancerous Lung samples relative to the normal samples.

[1179] As is evident from FIG. 32, the expression of Homo sapiens maba1 (KIAA1324) transcripts detectable by the above amplicon in small cell carcinoma samples was significantly higher than in the non-cancerous samples (sample numbers 51, 52, 53, 54, 55, 56, 57, 58, 59, 60, 61, 62, 63, 64, 69 and 70, Table 1_{—}6 above) and was higher in a few non-small cell carcinoma samples than in the non-cancerous samples. Notably an over-expression of at least 5 fold was found in 4 out of 9 small cell carcinoma samples, and in 7 out of 58 non-small cell carcinoma samples—3 out of 24 adenocarcinoma samples, in 4 out of 24 squamous cell carcinoma samples.

[1180] Statistical analysis was applied to verify the significance of these results, as described below.

[1181] The P value for the difference in the expression levels of Homo sapiens maba1 (KIAA1324) transcripts detectable by the above amplicon in Lung small cell carcinoma samples versus the normal tissue samples was determined by T test as 1.97e-002. The P value for the difference in the expression levels of Homo sapiens maba1 (KIAA1324) transcripts detectable by the above amplicon in Lung non-small cell carcinoma samples versus the normal tissue samples was determined by T test as 1.42e-002.

[1182] Threshold of 5 fold over expression was found to differentiate between small cell carcinoma and normal samples with P value of 9.96e-003 as checked by exact Fisher test.

[1183] The above values demonstrate statistical significance of the results.

[1184] Primer pairs are also optionally and preferably encompassed within the present invention; for example, for the above experiment, the following primer pair was used as a non-limiting illustrative example only of a suitable primer pair: H13410_seg58F (SEQ ID NO: 241) forward primer; and H13410_seg58R (SEQ ID NO: 242) reverse primer.

[1185] The present invention also preferably encompasses any amplicon obtained through the use of any suitable primer pair; for example, for the above experiment, the following amplicon was obtained as a non-limiting illustrative example only of a suitable amplicon: H13410_seg58 (SEQ ID NO: 243).

Expression of Homo sapiens maba1 (KIAA1324) H13410 Transcripts which are Detectable by Amplicon as Depicted in Sequence Name H13410_seg58 (SEQ ID NO: 243) in Normal and Cancerous Colon Tissues

[1186] Expression of Homo sapiens maba1 (KIAA1324) transcripts detectable by or according to seg58, H13410_seg58 (SEQ ID NO: 243) amplicon and primers H13410_seg58F (SEQ ID NO: 241) H13410_seg58R (SEQ ID NO: 242) was measured by real time PCR. In parallel the expression of three housekeeping genes—PBGD (GenBank Accession No. BC019323 (SEQ ID NO:336); amplicon—PBGD-amplicon (SEQ ID NO: 302)), HPRT1 (GenBank Accession No. NM_{—}000194 (SEQ ID NO:337); amplicon—HPRT1-amplicon (SEQ ID NO: 305) (SEQ ID NO: 305)) and G6PD (Genbank Accession No. NM_{—}000402 (SEQ ID NO:339); G6PD amplicon (SEQ ID NO: 311)) was measured similarly. For each RT sample, the expression of the above amplicon was normalized to normalization factor calculated from the expression of these house keeping genes as described in normalization method 2 in the “materials and methods” section. The normalized quantity of each RT sample was then divided by the median of the quantities of the normal samples (Sample Nos. 52, 42, 43, 44, 45, 46, 47, 48, 49, 50, 51, 53, 54, 55, 56, 57, 58, 59, 60, 61, 62, 63 and 64, Table 1_{—}8, above), to obtain a value of fold differential expression for each sample relative to the median of the normal samples.

[1187] In one experiment that was carried out no differential expression in the cancerous samples relative to the normal samples was observed.

[1188] Primer pairs are also optionally and preferably encompassed within the present invention; for example, for the above experiment, the following primer pair was used as a non-limiting illustrative example only of a suitable primer pair: H13410_seg58F (SEQ ID NO: 241) forward primer; and H13410_seg58R (SEQ ID NO: 242) reverse primer.

[1189] The present invention also preferably encompasses any amplicon obtained through the use of any suitable primer pair; for example, for the above experiment, the following amplicon was obtained as a non-limiting illustrative example only of a suitable amplicon: H13410_seg58 (SEQ ID NO: 243).

Expression of Homo sapiens maba1 H13410 Transcripts which are Detectable by Amplicon as Depicted in Sequence Name H13410_seg58 (SEQ ID NO: 243) in Different Normal Tissues.

[1190] Expression of Homo sapiens maba1 transcripts detectable by or according to seg58—H13410_seg58 (SEQ ID NO: 243) amplicon and primers H13410_seg58F (SEQ ID NO: 241) and H13410_seg58R (SEQ ID NO: 242) was measured by real time PCR. In parallel the expression of four housekeeping genes—SDHA (GenBank Accession No. NM_{—}004168 (SEQ ID NO:335); amplicon—SDHA-amplicon (SEQ ID NO:299)), Ubiquitin (GenBank Accession No. BC000449 (SEQ ID NO:341); amplicon—Ubiquitin-amplicon (SEQ ID NO: 317)), RPL19 (GenBank Accession No. NM_{—}000981 (SEQ ID NO:342); RPL19 amplicon (SEQ ID NO: 320)) and TATA box (GenBank Accession No. NM_{—}003194 (SEQ ID NO:343); TATA amplicon (SEQ ID NO: 323)) was measured similarly. For each RT sample, the expression of the above amplicon was normalized to the geometric mean of the quantities of the housekeeping genes. The normalized quantity of each RT sample was then divided by the median of the quantities of the breast samples (sample numbers 33, 34 and 35, Table 1_{—}9 above: “Tissue samples in normal panel”), to obtain a value of relative expression of each sample relative to the median of the breast samples.

[1191] FIG. 33A is a histogram showing the Expression of Homo sapiens maba1 H13410 transcripts which are detectable by amplicon as depicted in sequence name H13410_seg58 (SEQ ID NO: 243) in different normal tissues.

[1192] Expression of Homo sapiens maba1 (KIAA1324) transcripts detectable by or according to seg58-H13410_seg58 (SEQ ID NO: 243) amplicon and primers H13410_seg58F (SEQ ID NO: 241) and H13410_seg58R (SEQ ID NO: 242) was further measured by real time PCR using updated panel, as shown in Table 1_{—}10. In parallel the expression of three housekeeping genes—SDHA (GenBank Accession No. NM_{—}004168 (SEQ ID NO:335); amplicon—SDHA-amplicon (SEQ ID NO:299)), Ubiquitin (GenBank Accession No. BC000449 (SEQ ID NO:341); amplicon—Ubiquitin-amplicon (SEQ ID NO: 317)), RPL19 (GenBank Accession No. NM_{—}000981 (SEQ ID NO:342); RPL19 amplicon (SEQ ID NO: 320)) and TATA box (GenBank Accession No. NM_{—}003194 (SEQ ID NO:343); TATA amplicon (SEQ ID NO: 323)) was measured similarly. For each RT sample, the expression of the above amplicon was normalized to the normalization factor calculated from the expression of these house keeping genes as described in normalization method 2 in the “materials and methods” section. The normalized quantity of each RT sample was then divided by the median of the quantities of the breast samples (sample numbers 41, 42 and 43, Table 1_{—}10 above), to obtain a value of relative expression of each sample relative to the median of the breast samples—as presented FIG. 33B, or to the median of the quantities of the ovary samples (sample numbers 31, 32, 33 and 34, Table 1_{—}10 above), to obtain a value of relative expression of each sample relative to the median of the ovary samples—as presented in FIG. 33C, or to the median of the quantities of the lung samples (sample numbers 28, 29 and 30, Table 1_{—}10 above), to obtain a value of relative expression of each sample relative to the median of the lung samples—as presented in FIG. 33D.

Expression of Homo sapiens maba1 H13410 Transcripts which are Detectable by Amplicon as Depicted in Sequence Name H13410_seg12 (SEQ ID NO: 237) in Different Normal Tissues.

[1193] Expression of Homo sapiens maba1 transcripts detectable by or according to seg12—H13410_seg12 (SEQ ID NO: 237) amplicon and primers H13410_seg12F (SEQ ID NO: 235) and H13410_seg12R (SEQ ID NO: 236) was measured by real time PCR. In parallel the expression of four housekeeping genes—SDHA (GenBank Accession No. NM_{—}004168 (SEQ ID NO:335); amplicon—SDHA-amplicon (SEQ ID NO:299)), Ubiquitin (GenBank Accession No. BC000449 (SEQ ID NO:341); amplicon—Ubiquitin-amplicon (SEQ ID NO: 317)), RPL19 (GenBank Accession No. NM_{—}000981 (SEQ ID NO:342); RPL19 amplicon (SEQ ID NO: 320)) and TATA box (GenBank Accession No. NM_{—}003194 (SEQ ID NO:343); TATA amplicon (SEQ ID NO: 323)) was measured similarly. For each RT sample, the expression of the above amplicon was normalized to the geometric mean of the quantities of the housekeeping genes. The normalized quantity of each RT sample was then divided by the median of the quantities of the breast samples (sample numbers 33, 34 and 35, Table 119 above: “Tissue samples in normal panel”), to obtain a value of relative expression of each sample relative to the median of the breast samples.

[1194] FIG. 34A is a histogram showing the expression of Homo sapiens maba1 H13410 transcripts which are detectable by amplicon as depicted in sequence name H13410_seg12 (SEQ ID NO: 237) in different normal tissues.

[1195] Expression of Homo sapiens maba1 (KIAA1324) transcripts detectable by or according to seg12-H13410_seg12 (SEQ ID NO: 237) amplicon and primers H13410_seg12F (SEQ ID NO: 235) and H13410_seg12R (SEQ ID NO: 236) was further measured by real time PCR using updated panel, as presented in table 1_{—}10. In parallel the expression of three housekeeping genes—SDHA (GenBank Accession No. NM_{—}004168 (SEQ ID NO:335); amplicon—SDHA-amplicon (SEQ ID NO:299)), Ubiquitin (GenBank Accession No. BC000449 (SEQ ID NO:341); amplicon—Ubiquitin-amplicon (SEQ ID NO: 317)), and TATA box (GenBank Accession No. NM_{—}003194 (SEQ ID NO:343); TATA amplicon (SEQ ID NO: 323)) was measured similarly. For each RT sample, the expression of the above amplicon was normalized to the normalization factor calculated from the expression of these house keeping genes as described in normalization method 2 in the “materials and methods” section. The normalized quantity of each RT sample was then divided by the median of the quantities of the breast samples (sample numbers 41, 42 and 43, Table 1_{—}10 above), to obtain a value of relative expression of each sample relative to the median of the breast samples—as presented in FIG. 34B. The normalized the median of the quantities of the ovary samples (sample numbers 31, 32, 33 and 34, Table 1_{—}10 above), to obtain a value of relative expression of each sample relative to the median of the ovary samples—as presented in FIG. 34C, or by the median of the quantities of the lung samples (sample numbers 28, 29 and 30, Table 1_{—}10 above), to obtain a value of relative expression of each sample relative to the median of the lung samples—as presented in FIG. 34D.

[1196] FIG. 34 is a histogram showing expression of Homo sapiens maba1 (KIAA1324) H13410 transcripts which are detectable by amplicon as depicted in sequence name H13410_seg12 (SEQ ID NO: 237) in different normal tissues.

Expression of Homo sapiens maba1 H13410 Transcripts which are Detectable by Amplicon as Depicted in Sequence Name H13410_seg33 (SEQ ID NO: 240) in Different Normal Tissues

[1197] Expression of Homo sapiens maba1 transcripts detectable by or according to seg33—H13410_seg33 (SEQ ID NO: 240) amplicon and primers H13410_seg33F (SEQ ID NO: 238) and H13410_seg33R (SEQ ID NO: 239) was measured by real time PCR. In parallel the expression of four housekeeping genes—SDHA (GenBank Accession No. NM 004168 (SEQ ID NO:335); amplicon—SDHA-amplicon (SEQ ID NO:299)), Ubiquitin (GenBank Accession No. BC000449 (SEQ ID NO:341); amplicon—Ubiquitin-amplicon (SEQ ID NO: 317)), RPL19 (GenBank Accession No. NM_{—}000981 (SEQ ID NO:342); RPL19 amplicon (SEQ ID NO: 320)) and TATA box (GenBank Accession No. NM_{—}003194 (SEQ ID NO:343); TATA amplicon (SEQ ID NO: 323)) was measured similarly. For each RT sample, the expression of the above amplicon was normalized to the geometric mean of the quantities of the housekeeping genes. The normalized quantity of each RT sample was then divided by the median of the quantities of the breast samples (sample numbers 33, 34 and 35, Table 1_{—}9 above), to obtain a value of relative expression of each sample relative to the median of the breast samples.

[1198] FIG. 35A is a histogram showing the expression of Homo sapiens maba1 H13410 transcripts which are detectable by amplicon as depicted in sequence name H13410_seg33 (SEQ ID NO: 240) in different normal tissues.

[1199] Expression of Homo sapiens maba1 (KIAA1324) transcripts detectable by or according to seg33-H13410_seg33 (SEQ ID NO: 240) amplicon and primers H13410_seg33F (SEQ ID NO: 238) and H13410_seg33R (SEQ ID NO: 239) was further measured by real time PCR on updated panel, as shown in Table 1_{—}10. In parallel the expression of three housekeeping genes—SDHA (GenBank Accession No. NM_{—}004168 (SEQ ID NO:335); amplicon—SDHA-amplicon (SEQ ID NO:299)), Ubiquitin (GenBank Accession No. BC000449 (SEQ ID NO:341); amplicon—Ubiquitin-amplicon (SEQ ID NO: 317)), and TATA box (GenBank Accession No. NM_{—}003194 (SEQ ID NO:343); TATA amplicon (SEQ ID NO: 323)) was measured similarly. For each RT sample, the expression of the above amplicon was normalized to the normalization factor calculated from the expression of these house keeping genes as described in normalization method 2 in the “materials and methods” section. The normalized quantity of each RT sample was then divided by the median of the quantities of the breast samples (sample numbers 41, 42 and 43, Table 1_{—}10 above), to obtain a value of relative expression of each sample relative to the median of the breast samples—as presented in FIG. 35B, or to the median of the quantities of the ovary samples (sample numbers 31, 32, 33 and 34, Table 1_{—}10 above), to obtain a value of relative expression of each sample relative to the median of the ovary samples—as presented in FIG. 35C, or to the median of the quantities of the lung samples (sample numbers 28, 29 and 30, Table 1_{—}10 above), to obtain a value of relative expression of each sample relative to the median of the lung samples—see FIG. 35D.

Expression of Homo sapiens maba1 (KIAA1324) H13410 Transcripts which are Detectable by Amplicon as Depicted in Sequence Name H13410_seg12 (SEQ ID NO: 237) in Normal and Cancerous Ovary Tissues

[1200] Expression of Homo sapiens maba1 (KIAA1324) transcripts detectable by or according to seg12-H13410_seg12 (SEQ ID NO: 237) amplicon and primers H13410_seg12F (SEQ ID NO: 235) and H13410_seg12R (SEQ ID NO: 236) was measured by real time PCR. In parallel the expression of four housekeeping genes—SDHA (GenBank Accession No. NM_{—}004168 (SEQ ID NO:335); amplicon—SDHA-amplicon (SEQ ID NO:299)), HPRT1 (GenBank Accession No. NM_{—}000194 (SEQ ID NO:337); amplicon—HPRT1-amplicon (SEQ ID NO: 305) (SEQ ID NO: 305)), PBGD (GenBank Accession No. BC019323 (SEQ ID NO:336); amplicon—PBGD-amplicon (SEQ ID NO: 302)) and GAPDH (GenBank Accession No. BC026907 (SEQ ID NO:338); GAPDH amplicon (SEQ ID NO: 308)) was measured similarly. For each RT sample, the expression of the above amplicon was normalized to the geometric mean of the quantities of the housekeeping genes. The normalized quantity of each RT sample was then divided by the median of the quantities of the normal post-mortem (PM) samples (sample numbers 45, 46, 71 and 48, Table 1_{—}1 above), to obtain a value of fold up-regulation for each sample relative to the median of the normal PM samples.

[1201] FIG. 36A is a histogram showing over expression of the Homo sapiens maba1 (KIAA1324) transcripts in cancerous Ovary samples relative to the normal samples.

[1202] As is evident from FIG. 36A, the expression of Homo sapiens maba1 (KIAA1324) transcripts detectable by the above amplicon in adenocarcinoma samples was significantly higher than in the non-cancerous samples (sample numbers 45, 46, 71 and 48, Table 1_{—}1 above). Notably an over-expression of at least 5 fold was found in 26 out of 43 adenocarcinoma samples, specifically in 19 out of 30 serous carcinoma samples and in 3 out of 6 mucinous carcinoma samples. Over expression was observed daily in patients with age lower than 50 or higher than 68.

[1203] Statistical analysis was applied to verify the significance of these results, as described below.

[1204] The P value for the difference in the expression levels of Homo sapiens maba1 (KIAA1324) transcripts detectable by the above amplicon in Ovary serous carcinoma samples versus the normal tissue samples was determined by T test as 2.61e-003. The P value for the difference in the expression levels of Homo sapiens maba1 (KIAA1324) transcripts detectable by the above amplicon in all ovary adenocarcinoma samples versus the normal tissue samples was determined by T test as 1.74e-004.

[1205] Threshold of 5 fold over expression was found to differentiate between serous carcinoma and normal samples with P value of 2.94e-002 as checked by exact Fisher test. Threshold of 5 fold over expression was found to differentiate between all adenocarcinoma and normal samples with P value of 3.36e-002 as checked by exact Fisher test.

[1206] The above values demonstrate statistical significance of the results.

[1207] Primer pairs are also optionally and preferably encompassed within the present invention; for example, for the above experiment, the following primer pair was used as a non-limiting illustrative example only of a suitable primer pair: H13410_seg12F (SEQ ID NO: 235) forward primer; and H13410_seg12R (SEQ ID NO: 236) reverse primer

[1208] The present invention also preferably encompasses any amplicon obtained through the use of any suitable primer pair; for example, for the above experiment, the following amplicon was obtained as a non-limiting illustrative example only of a suitable amplicon: H13410_seg12 (SEQ ID NO: 237).

[1209] Expression of Homo sapiens maba1 (KIAA1324) transcripts detectable by or according to seg12-H13410_seg12 (SEQ ID NO: 237) amplicon and primers H13410_seg12F (SEQ ID NO: 235) and H13410_seg12R (SEQ ID NO: 236) was further measured by real time PCR using enlarged panel as shown in Table 1-5. In parallel the expression of three housekeeping genes—SDHA (GenBank Accession No. NM_{—}004168 (SEQ ID NO:335); amplicon—SDHA-amplicon (SEQ ID NO:299)), HPRT1 (GenBank Accession No. NM 000194 (SEQ ID NO:337); amplicon—HPRT1-amplicon (SEQ ID NO: 305) (SEQ ID NO: 305)) and G6PD (GenBank Accession No. NM_{—}000402 (SEQ ID NO:339); G6PD amplicon (SEQ ID NO: 311)) was measured similarly. For each RT sample, the expression of the above amplicon was normalized to the normalization factor calculated from the expression of these house keeping genes as described in normalization method 2 in the “materials and methods” section. The normalized quantity of each RT sample was then divided by the median of the quantities of the normal samples (sample numbers 52, 53, 54, 55, 56, 57, 58, 59, 60, 61, 62, 63, 64, 65, 66, 67, 68, 69, 70, 71, 72, 73, 74, 75, 76, 77 and 78, Table 1_{—}5 above), to obtain a value of fold up-regulation for each sample relative to the median of the normal samples.

[1210] FIGS. 36B and 36C are histograms showing over expression of the above-indicated Homo sapiens maba1 (KIAA1324) transcripts in cancerous Ovary samples relative to the normal samples. In FIG. 36B the samples are arranged according to the patient's age, and in FIG. 36C samples are arranged according to patient's stage.

[1211] As is evident from FIGS. 36B and 36C, the expression of Homo sapiens maba1 (KIAA1324) transcripts detectable by the above amplicon in adenocarcinoma samples was significantly higher than in the non-cancerous samples (sample numbers 52, 53, 54, 55, 56, 57, 58, 59, 60, 61, 62, 63, 64, 65, 66, 67, 68, 69, 70, 71, 72, 73, 74, 75, 76, 77 and 78, Table 1_{—}5 above). Notably an over-expression of at least 5 fold was found in 37 out if 69 adenocarcinoma samples, specifically in 20 out of 43 serous carcinoma samples, in 9 out of 12 mucinous carcinoma samples and in 7 out of 10 endometroid samples. From FIG. 36B it can be observed that in serous samples over expression was mainly in patients with age below 50, in mucinus samples over expression was higher in patients with age below 50 and in endometroid over expression was mainly in patients with age above 50. From FIG. 36C it can be seen that in serous samples over expression was mainly in patients with stage I and II.

[1212] Statistical analysis was applied to verify the significance of these results, as described below.

[1213] The P value for the difference in the expression levels of Homo sapiens maba1 (KIAA1324) transcripts detectable by the above amplicon in Ovary adenocarcinoma samples versus the normal tissue samples was determined by T test as 1.96e-005. The P value for the difference in the expression levels of Homo sapiens maba1 (KIAA1324) transcripts detectable by the above amplicon in Ovary serous carcinoma samples versus the normal tissue samples was determined by T test as 1.29e-003. The P value for the difference in the expression levels of Homo sapiens maba1 (KIAA1324) transcripts detectable by the above amplicon in Ovary mucinous carcinoma samples versus the normal tissue samples was determined by T test as 5.06e-002. The P value for the difference in the expression levels of Homo sapiens maba1 (KIAA1324) transcripts detectable by the above amplicon in Ovary endometroid samples versus the normal tissue samples was determined by T test as 4.05e-002.

[1214] Threshold of 5 fold over expression was found to differentiate between adenocarcinoma and normal samples with P value of 8.92e-005 as checked by exact Fisher test. Threshold of 5 fold over expression was found to differentiate between serous carcinoma and normal samples with P value of 1.78e-003 as checked by exact Fisher test. Threshold of 5 fold over expression was found to differentiate between mucinous carcinoma and normal samples with P value of 1.69e-004 as checked by exact Fisher test. Threshold of 5 fold over expression was found to differentiate between endometroid and normal samples with P value of 1.04e-003 as checked by exact Fisher test.

[1215] The above values demonstrate statistical significance of the results.

[1216] Primer pairs are also optionally and preferably encompassed within the present invention; for example, for the above experiment, the following primer pair was used as a non-limiting illustrative example only of a suitable primer pair: H13410_seg12F (SEQ ID NO: 235) forward primer; and H13410_seg12R (SEQ ID NO: 236) reverse primer.

[1217] The present invention also preferably encompasses any amplicon obtained through the use of any suitable primer pair; for example, for the above experiment, the following amplicon was obtained as a non-limiting illustrative example only of a suitable amplicon: H13410_seg12 (SEQ ID NO: 237).

Expression of Homo sapiens maba1 (KIAA1324) H113410 Transcripts which are Detectable by Amplicon as Depicted in Sequence Name H13410_seg33 (SEQ ID NO: 240) in Normal and Cancerous Ovary Tissues

[1218] Expression of Homo sapiens maba1 (KIAA1324) transcripts detectable by or according to seg33-H13410_seg33 (SEQ ID NO: 240) amplicon and primers H13410_seg33F (SEQ ID NO: 238) and H13410_seg33R (SEQ ID NO: 239) was measured by real time PCR. In parallel the expression of four housekeeping genes—SDHA (GenBank Accession No. NM_{—}004168 (SEQ ID NO:335); amplicon—SDHA-amplicon (SEQ ID NO:299)), HPRT1 (GenBank Accession No. NM_{—}000194 (SEQ ID NO:337); amplicon—HPRT1-amplicon (SEQ ID NO: 305) (SEQ ID NO: 305)), PBGD (GenBank Accession No. BC019323 (SEQ ID NO:336); amplicon—PBGD-amplicon (SEQ ID NO: 302)) and GAPDH (GenBank Accession No. BC026907 (SEQ ID NO:338); GAPDH amplicon (SEQ ID NO: 308)) was measured similarly. For each RT sample, the expression of the above amplicon was normalized to the geometric mean of the quantities of the housekeeping genes. The normalized quantity of each RT sample was then divided by the median of the quantities of the normal post-mortem (PM) samples (sample numbers 45, 46, 71 and 48, Table 1_{—}1 above), to obtain a value of fold up-regulation for each sample relative to the median of the normal PM samples.

[1219] FIG. 37A is a histogram showing over expression of the Homo sapiens maba1 (KIAA1324) transcripts in cancerous Ovary samples relative to the normal samples.

[1220] As is evident from FIG. 37A, the expression of Homo sapiens maba1 (KIAA1324) transcripts detectable by the above amplicon in adenocarcinoma samples was significantly higher than in the non-cancerous samples (sample numbers 45, 46, 71 and 48, Table 1_{—}1 above). Notably an over-expression of at least 5 fold was found in 27 out of 43 adenocarcinoma samples, specifically in 19 out of 30 serous carcinoma samples and in 4 out of 6 mucinous carcinoma samples. Over expression was observed maily in patients with age lower than 50 or higher than 68.

[1221] Statistical analysis was applied to verify the significance of these results, as described below.

[1222] The P value for the difference in the expression levels of Homo sapiens maba1 (KIAA1324) transcripts detectable by the above amplicon in ovary serous carcinoma samples versus the normal tissue samples was determined by T test as 1.23e-003. The P value for the difference in the expression levels of Homo sapiens maba1 (KIAA1324) transcripts detectable by the above amplicon in all ovary adenocarcinoma samples versus the normal tissue samples was determined by T test as 7.47e-005.

[1223] Threshold of 5 fold over expression was found to differentiate between serous carcinoma and normal samples with P value of 2.94e-002 as checked by exact Fisher test. Threshold of 5 fold over expression was found to differentiate between all adenocarcinoma and normal samples with P value of 2.72e-002 as checked by exact Fisher test.

[1224] The above values demonstrate statistical significance of the results.

[1225] Primer pairs are also optionally and preferably encompassed within the present invention; for example, for the above experiment, the following primer pair was used as a non-limiting illustrative example only of a suitable primer pair: H13410_seg33F (SEQ ID NO: 238) forward primer; and H13410_seg33R (SEQ ID NO: 239) reverse primer.

[1226] The present invention also preferably encompasses any amplicon obtained through the use of any suitable primer pair; for example, for the above experiment, the following amplicon was obtained as a non-limiting illustrative example only of a suitable amplicon: H13410_seg33 (SEQ ID NO: 240).

[1227] Expression of Homo sapiens maba1 (KIAA1324) transcripts detectable by or according to seg33-H13410_seg33 (SEQ ID NO: 240) amplicon and primers H13410_seg33F (SEQ ID NO: 238) and H13410_seg33R (SEQ ID NO: 239) was further measured by real time PCR using enlarged panel as shown in Table 1_{—}5. In parallel the expression of three housekeeping genes—SDHA (GenBank Accession No. NM_{—}004168 (SEQ ID NO:335); amplicon—SDHA-amplicon (SEQ ID NO:299)), EPRT1 (GenBank Accession No. NM_{—}000194 (SEQ ID NO:337); amplicon—HPRT1-amplicon (SEQ ID NO: 305) (SEQ ID NO: 305)) and G6PD (GenBank Accession No. NM_{—}000402 (SEQ ID NO:339); G6PD amplicon (SEQ ID NO: 311)) was measured similarly. For each RT sample, the expression of the above amplicon was normalized to the normalization factor calculated from the expression of these house keeping genes as described in normalization method 2 in the “materials and methods” section. The normalized quantity of each RT sample was then divided by the median of the quantities of the normal samples (sample numbers 52, 53, 54, 55, 56, 57, 58, 59, 60, 61, 62, 63, 64, 65, 66, 67, 68, 69, 70, 71, 72, 73, 74, 75, 76, 77 and 78, Table 1_{—}5 above), to obtain a value of fold up-regulation for each sample relative to the median of the normal samples.

[1228] FIGS. 37B and 37C are histograms showing over expression of the above-indicated Homo sapiens maba1 (KIAA1324) transcripts in cancerous Ovary samples relative to the normal samples. In FIG. 37B the samples are arranged according to the patient's age, and in FIG. 37C samples are arranged according to the patient's stage.

[1229] As is evident from FIGS. 37B and 37C, the expression of Homo sapiens maba1 (KIAA1324) transcripts detectable by the above amplicon in adenocarcinoma samples was significantly higher than in the non-cancerous samples (sample numbers 52, 53, 54, 55, 56, 57, 58, 59, 60, 61, 62, 63, 64, 65, 66, 67, 68, 69, 70, 71, 72, 73, 74, 75, 76, 77 and 78, Table 1_{—}5 above). Notably an over-expression of at least 5 fold was found in 36 out of 69 adenocarcinoma samples, specifically in 20 out of 43 serous carcinoma samples, in 8 out of 12 mucinous carcinoma samples and in 7 out of 10 endometroid samples. From FIG. 37B it can be observed that in serous samples over expression was mainly in patients with age below 50, in mucinus samples over expression was higher in patients with age below 50 and in endometroid over expression was mainly in patients with age above 50. From FIG. 37C it can be seen that in serous samples over expression was mainly in patients with stage I and II.

[1230] Statistical analysis was applied to verify the significance of these results, as described below.

[1231] The P value for the difference in the expression levels of Homo sapiens maba1 (KIAA1324) transcripts detectable by the above amplicon in Ovary adenocarcinoma samples versus the normal tissue samples was determined by T test as 8.76e-006. The P value for the difference in the expression levels of Homo sapiens maba1 (KIAA1324) transcripts detectable by the above amplicon in Ovary serous carcinoma samples versus the normal tissue samples was determined by T test as 1.55e-003. The P value for the difference in the expression levels of Homo sapiens maba1 (KIAA1324) transcripts detectable by the above amplicon in Ovary mucinous carcinoma samples versus the normal tissue samples was determined by T test as 4.29e-002. The P value for the difference in the expression levels of Homo sapiens maba1 (KIAA1324) transcripts detectable by the above amplicon in Ovary endometroid samples versus the normal tissue samples was determined by T test as 1.10e-002.

[1232] Threshold of 5 fold over expression was found to differentiate between adenocarcinoma and normal samples with P value of 1.43e-004 as checked by exact Fisher test Threshold of 5 fold over expression was found to differentiate between serous carcinoma and normal samples with P value of 1.78e-003 as checked by exact Fisher test. Threshold of 5 fold over expression was found to differentiate between mucinous carcinoma and normal samples with P value of 8.99e-004 as checked by exact Fisher test. Threshold of 5 fold over expression was found to differentiate between endometroid and normal samples with P value of 1.04e-003 as checked by exact Fisher test.

[1233] The above values demonstrate statistical significance of the results.

[1234] Primer pairs are also optionally and preferably encompassed within the present invention; for example, for the above experiment, the following primer pair was used as a non-limiting illustrative example only of a suitable primer pair: H13410_seg33F (SEQ ID NO: 238) forward primer; and H13410_seg33R (SEQ ID NO: 239) reverse primer.

[1235] The present invention also preferably encompasses any amplicon obtained through the use of any suitable primer pair; for example, for the above experiment, the following amplicon was obtained as a non-limiting illustrative example only of a suitable amplicon: H13410_seg33 (SEQ ID NO: 240).

Expression of Homo sapiens maba1 H13410 Transcripts which are Detectable by Amplicon as Depicted in Sequence Name H13410_seg58 (SEQ ID NO: 243)) in Normal and Cancerous Ovary Tissues

[1236] Expression of Homo sapiens maba1 transcripts detectable by or according to seg58-H13410_seg58 (SEQ ID NO: 243) amplicon and primers H13410_seg58F (SEQ ID NO: 241) and H13410_seg58R (SEQ ID NO: 242) was measured by real time PCR. In parallel the expression of four housekeeping genes—SDHA (GenBank Accession No. NM_{—}004168 (SEQ ID NO:335); amplicon—SDHA-amplicon (SEQ ID NO:299)), HPRT1 (GenBank Accession No. NM_{—}000194 (SEQ ID NO:337); amplicon—HPRT1-amplicon (SEQ ID NO: 305) (SEQ ID NO: 305)), PBGD (GenBank Accession No. BC019323 (SEQ ID NO:336); amplicon—PBGD-amplicon (SEQ ID NO: 302)) and GAPDH (GenBank Accession No. BC026907 (SEQ ID NO:338); GAPDH amplicon (SEQ ID NO: 308)) was measured similarly. For each RT sample, the expression of the above amplicon was normalized to the geometric mean of the quantities of the housekeeping genes. The normalized quantity of each RT sample was then divided by the median of the quantities of the normal post-mortem (PM) samples (sample numbers 45, 46, 71 and 48, Table 1_{—}1 above), to obtain a value of fold up-regulation for each sample relative to the median of the normal PM samples.

[1237] FIG. 38A is a histogram showing over expression of the Homo sapiens maba1 transcripts in cancerous Ovary samples relative to the normal samples.

[1238] As is evident from FIG. 38A, the expression of Homo sapiens maba1 transcripts detectable by the above amplicon in adenocarcinoma samples was significantly higher than in the non-cancerous samples (sample numbers 45, 46, 71 and 48, Table 1_{—}1 above). Notably an over-expression of at least 5 fold was found in 24 out of 43 adenocarcinoma samples, specifically in 17 out of 30 serous carcinoma samples and in 4 out of 6 mucinous carcinoma samples. Over expression was observed daily in patients with age lower than 50 or higher than 68.

[1239] Statistical analysis was applied to verify the significance of these results, as described below.

[1240] The P value for the difference in the expression levels of Homo sapiens maba1 transcripts detectable by the above amplicon in ovary serous carcinoma samples versus the normal tissue samples was determined by T test as 1.10e-003. The P value for the difference in the expression levels of Homo sapiens maba1 transcripts detectable by the above amplicon in all ovary adenocarcinoma samples versus the normal tissue samples was determined by T test as 6.01e-005.

[1241] Threshold of 5 fold over expression was found to differentiate between adenocarcinoma and normal samples with P value of 4.96e-002 as checked by exact Fisher test.

[1242] The above values demonstrate statistical significance of the results.

[1243] Primer pairs are also optionally and preferably encompassed within the present invention; for example, for the above experiment, the following primer pair was used as a non-limiting illustrative example only of a suitable primer pair: H13410_seg58F (SEQ ID NO: 241) forward primer; and H13410_seg58R (SEQ ID NO: 242) reverse primer).

[1244] The present invention also preferably encompasses any amplicon obtained through the use of any suitable primer pair; for example, for the above experiment, the following amplicon was obtained as a non-limiting illustrative example only of a suitable amplicon: H13410_seg58 (SEQ ID NO: 243).

[1245] Expression of Homo sapiens maba1 (KIAA1324) transcripts detectable by or according to seg58-H13410_seg58 (SEQ ID NO: 243) amplicon and primers H13410_seg58F (SEQ ID NO: 241) and H13410_seg58R (SEQ ID NO: 242) was further measured by real time PCR using enlarged panel as shown in Table 1_{—}5. In parallel the expression of three housekeeping genes—SDHA (GenBank Accession No. NM_{—}004168 (SEQ ID NO:335); amplicon—SDHA-amplicon (SEQ ID NO:299)), HPRT1 (GenBank Accession No. NM_{—}000194 (SEQ ID NO:337); amplicon—HPRT1-amplicon (SEQ ID NO: 305) (SEQ ID NO: 305)) and G6PD (GenBank Accession No. NM_{—}000402 (SEQ ID NO:339); G6PD amplicon (SEQ ID NO: 311)) was measured similarly. For each RT sample, the expression of the above amplicon was normalized to the normalization factor calculated from the expression of these house keeping genes as described in normalization method 2 in the “materials and methods” section. The normalized quantity of each RT sample was then divided by the median of the quantities of the normal samples (sample numbers 52, 53, 54, 55, 56, 57, 58, 59, 60, 61, 62, 63, 64, 65, 66, 67, 68, 69, 70, 71, 72, 73, 74, 75, 76, 77 and 78, Table 1_{—}5 above), to obtain a value of fold up-regulation for each sample relative to the median of the normal samples.

[1246] FIGS. 38B and 38C are histograms showing over expression of the above-indicated Homo sapiens maba1 (KIAA1324) transcripts in cancerous Ovary samples relative to the normal samples. In FIG. 38B the samples are arranged according to the patient's age, and in FIG. 38C samples are arranged according to the patient's stage.

[1247] As is evident from FIGS. 38B and 38C, the expression of Homo sapiens maba1 (KIAA1324) transcripts detectable by the above amplicon in serous carcinoma, mucinous carcinoma and adenocarcinoma samples was significantly higher than in the non-cancerous samples (sample numbers 52, 53, 54, 55, 56, 57, 58, 59, 60, 61, 62, 63, 64, 65, 66, 67, 68, 69, 70, 71, 72, 73, 74, 75, 76, 77 and 78, Table 1_{—}5 above). Notably an over-expression of at least 5 fold was found in 32 out of 69 adenocarcinoma samples, specifically in 16 out of 43 serous carcinoma samples, in 7 out of 12 mucinous carcinoma samples and in 8 out of 10 endometroid samples. From FIG. 38B it can be observed that in serous samples over expression was mainly in patients with age below 50, in mucinus samples over expression was higher in patients with age below 50 and in endometroid over expression was mainly in patients with age above 50. From FIG. 38C it can be seen that in serous samples over expression was mainly in patients with stage I and II.

[1248] Statistical analysis was applied to verify the significance of these results, as described below.

[1249] The P value for the difference in the expression levels of Homo sapiens maba1 (KIAA1324) transcripts detectable by the above amplicon in Ovary adenocarcinoma samples versus the normal tissue samples was determined by T test as 3.54e-005. The P value for the difference in the expression levels of Homo sapiens maba1 (KIAA1324) transcripts detectable by the above amplicon in Ovary serous carcinoma samples versus the normal tissue samples was determined by T test as 7.18e-003. The P value for the difference in the expression levels of Homo sapiens maba1 (KIAA1324) transcripts detectable by the above amplicon in Ovary mucinous carcinoma samples versus the normal tissue samples was determined by T test as 2.55e-002. The P value for the difference in the expression levels of Homo sapiens maba1 (KIAA1324) transcripts detectable by the above amplicon in Ovary endometroid samples versus the normal tissue samples was determined by T test as 1.86e-002.

[1250] Threshold of 5 fold over expression was found to differentiate between adenocarcinoma and normal samples with P value of 2.30e-005 as checked by exact Fisher test. Threshold of 5 fold over expression was found to differentiate between serous carcinoma and normal samples with P value of 9.60e-004 as checked by exact Fisher test. Threshold of 5 fold over expression was found to differentiate between mucinous carcinoma and normal samples with P value of 3.54e-004 as checked by exact Fisher test. Threshold of 5 fold over expression was found to differentiate between endometroid and normal samples with P value of 9.81e-006 as checked by exact Fisher test.

[1251] The above values demonstrate statistical significance of the results.

[1252] Primer pairs are also optionally and preferably encompassed within the present invention; for example, for the above experiment, the following primer pair was used as a non-limiting illustrative example only of a suitable primer pair: H13410_seg58F (SEQ ID NO: 241) forward primer; and H13410_seg58R (SEQ ID NO: 242) reverse primer.

[1253] The present invention also preferably encompasses any amplicon obtained through the use of any suitable primer pair; for example, for the above experiment, the following amplicon was obtained as a non-limiting illustrative example only of a suitable amplicon: H13410_seg58 (SEQ ID NO: 243).

Expression of Homo sapiens maba1 (KIAA1324) H13410 Transcripts which are Detectable by Amplicon as Depicted in Sequence Name H13410_junc20-27F2R2 (SEQ ID NO: 385) in Normal and Cancerous Breast Tissues

[1254] Expression of Homo sapiens maba1 (KIAA1324) transcripts detectable by or according to junc20-27F2R2-H13410_junc20-27F2R2 (SEQ ID NO: 385) amplicon and primers H13410_junc20-27F2 (SEQ ID NO: 383) and H13410_junc20-27R2 (SEQ ID NO: 384) was measured by real time PCR. In parallel the expression of four housekeeping genes—G6PD (GenBank Accession No. NM_{—}000402 (SEQ ID NO:339); G6PD amplicon (SEQ ID NO: 311)), HPRT1 (GenBank Accession No. NM_{—}000194 (SEQ ID NO:337); amplicon—HPRT1-amplicon (SEQ ID NO: 305) (SEQ ID NO: 305)), PBGD (GenBank Accession No. BC019323 (SEQ ID NO:336); amplicon—PBGD-amplicon (SEQ ID NO: 302)) and SDHA (GenBank Accession No. NM_{—}004168 (SEQ ID NO:335); amplicon—SDHA-amplicon (SEQ ID NO:299)) was measured similarly. For each RT sample, the expression of the above amplicon was normalized to the geometric mean of the quantities of the housekeeping genes. The normalized quantity of each RT sample was then divided by the median of the quantities of the normal post-mortem (PM) samples (sample numbers 57, 59, 60, 63, 66, 64, 56, 65, 67 and 58, Table 1_{—}3 above), to obtain a value of fold up-regulation for each sample relative to the median of the normal PM samples.

[1255] FIG. 39 is a histogram showing over expression of the above-indicated Homo sapiens maba1 (KIAA1324) transcripts in cancerous Breast samples relative to the normal samples.

[1256] As is evident from FIG. 39, the expression of Homo sapiens maba1 (KIAA1324) transcripts detectable by the above amplicon in cancer samples was higher than in the non-cancerous samples (sample numbers 57, 59, 60, 63, 66, 64, 56, 65, 67 and 58, Table 1_{—}3 above). Notably an over-expression of at least 5 fold was found in 7 out of 28 adenocarcinoma samples.

[1257] Statistical analysis was applied to verify the significance of these results, as described below.

[1258] The P value for the difference in the expression levels of Homo sapiens maba1 (KIAA1324) transcripts detectable by the above amplicon in Breast cancer samples versus the normal tissue samples was determined by T test as 2.05e-02.

[1259] The above values demonstrate statistical significance of the results.

[1260] Primer pairs are also optionally and preferably encompassed within the present invention; for example, for the above experiment, the following primer pair was used as a non-limiting illustrative example only of a suitable primer pair: H13410_junc20-27F2 (SEQ ID NO: 383) forward primer; and H13410_junc20-27R (SEQ ID NO: 384) reverse primer.

[1261] The present invention also preferably encompasses any amplicon obtained through the use of any suitable primer pair; for example, for the above experiment, the following amplicon was obtained as a non-limiting illustrative example only of a suitable amplicon: H13410_junc20-27F2R2 (SEQ ID NO: 385).

Expression of Homo sapiens maba1 (KIAA1324) H13410 Transcripts which are Detectable by Amplicon as Depicted in Sequence Name H13410_junc20-27F2R2 (SEQ ID NO: 385) in Different Normal Tissues

[1262] Expression of Homo sapiens maba1 (KIAA1324) transcripts detectable by or according to junc20-27F2R2-H13410_junc20-27F2R2 (SEQ ID NO: 385) amplicon and primers H13410_junc20-27F2 (SEQ ID NO: 383) and H13410_junc20-27R2 (SEQ ID NO: 384) was measured by real time PCR. In parallel the expression of four housekeeping genes—SDHA (GenBank Accession No. NM_{—}004168 (SEQ ID NO:335); amplicon—SDHA-amplicon (SEQ ID NO:299)), Ubiquitin (GenBank Accession No. BC000449 (SEQ ID NO:341); amplicon—Ubiquitin-amplicon (SEQ ID NO: 317)), RPL19 (GenBank Accession No. NM_{—}000981 (SEQ ID NO:342); RPL19 amplicon (SEQ ID NO: 320)) and TATA box (GenBank Accession No. NM_{—}003194 (SEQ ID NO:343); TATA amplicon (SEQ ID NO: 323)) was measured similarly. For each RT sample, the expression of the above amplicon was normalized to the geometric mean of the quantities of the housekeeping genes. The normalized quantity of each RT sample was then divided by the median of the quantities of the ovary samples (sample numbers 19 and 20, Table 1_{—}9 above), to obtain a value of relative expression of each sample relative to the median of the ovary samples.

[1263] FIG. 40 is a histogram showing over expression of the above-indicated Homo sapiens maba1 (KIAA1324) H13410 transcripts which are detectable by amplicon as depicted in sequence name H13410_junc20-27F2R2 (SEQ ID NO: 385) in different normal samples.

Expression of Homo sapiens maba1 (KIAA1324) H13410 Transcripts which are Detectable by Amplicon as Depicted in Sequence Name H13410_junc20-27F2R2 (SEQ ID NO: 385) in Normal and Cancerous Ovary Tissues

[1264] Expression of Homo sapiens maba1 (KIAA1324) transcripts detectable by or according to junc20-27F2R2-H13410_junc20-27F2R2 (SEQ ID NO: 385) amplicon and primers H13410_junc20-27F2 (SEQ ID NO: 383) and H13410_junc20-27R2 (SEQ ID NO: 384) was measured by real time PCR. In parallel the expression of four housekeeping genes—SDHA (GenBank Accession No. NM_{—}004168 (SEQ ID NO:335); amplicon—SDHA-amplicon (SEQ ID NO:299)), HPRT1 (GenBank Accession No. NM_{—}000194 (SEQ ID NO:337); amplicon—HPRT1-amplicon (SEQ ID NO: 305) (SEQ ID NO: 305)), PBGD (GenBank Accession No. BC019323 (SEQ ID NO:336); amplicon—PBGD-amplicon (SEQ ID NO: 302)) and GAPDH (GenBank Accession No. BC026907 (SEQ ID NO:338); GAPDH amplicon (SEQ ID NO: 308)) was measured similarly. For each RT sample, the expression of the above amplicon was normalized to the geometric mean of the quantities of the housekeeping genes. The normalized quantity of each RT sample was then divided by the median of the quantities of the normal post-mortem (PM) samples (sample numbers 45, 46, 71 and 48, Table 1_{—}1 above), to obtain a value of fold up-regulation for each sample relative to the median of the normal PM samples.

[1265] FIG. 41 is a histogram showing over expression of the above-indicated Homo sapiens maba1 (KIAA1324) transcripts in cancerous Ovary samples relative to the normal samples.

[1266] As is evident from FIG. 41, the expression of Homo sapiens maba1 (KIAA1324) transcripts detectable by the above amplicon in adenocarcinoma samples was higher than in the non-cancerous samples (sample numbers 45, 46, 71 and 48, Table 1_{—}1 above), mainly in patients below 50 or above 68 years old. Notably an over-expression of at least 5 fold was found in 28 out of 43 adenocarcinoma samples, specifically in 19 out of 30 serous carcinoma samples and in 4 out of 6 mucinous carcinoma samples.

[1267] Statistical analysis was applied to verify the significance of these results, as described below.

[1268] The P value for the difference in the expression levels of Homo sapiens maba1 (KIAA1324) transcripts detectable by the above amplicon in Ovary serous carcinoma samples versus the normal tissue samples was determined by T test as 1.55e-03. The P value for the difference in the expression levels of Homo sapiens maba1 (KIAA1324) transcripts detectable by the above amplicon in Ovary adenocarcinoma samples versus the normal tissue samples was determined by T test as 2.15e-04.

[1269] The above values demonstrate statistical significance of the results.

[1270] Primer pairs are also optionally and preferably encompassed within the present invention; for example, for the above experiment, the following primer pair was used as a non-limiting illustrative example only of a suitable primer pair: H13410_junc20-27F2 (SEQ ID NO: 383) forward primer; and H13410_junc20-27R2 (SEQ ID NO: 384) reverse primer.

[1271] The present invention also preferably encompasses any amplicon obtained through the use of any suitable primer pair; for example, for the above experiment, the following amplicon was obtained as a non-limiting illustrative example only of a suitable amplicon: H13410_junc20-27F2R2 (SEQ ID NO: 385).

### Description for Cluster H61775

[1272] A description of some of these segments according to the present invention is now provided. Cluster H61775 (internal ID 8683039) features 2 transcript(s) and 3 segment(s) of interest, the names for which are given in Tables 82 and 83, respectively, the sequences themselves are given at the Sequence Listing. The selected protein variants are given in table 84.

TABLE 82
Transcripts of interest
Transcript Name

H61775_T22 (SEQ ID NO: 345)
H61775_T23 (SEQ ID NO: 346)

TABLE 83
Segments of interest
Segment Name

H61775_N6 (SEQ ID NO: 347)
H61775_N8 (SEQ ID NO: 348)
H61775_N5 (SEQ ID NO: 349)

TABLE 84
Proteins of interest

| Protein Name | Corresponding Transcript(s) |
|---|---|
| H61775_P17 (SEQ ID NO: 354) | H61775_T22 (SEQ ID NO: 345) |
| H61775_P18 (SEQ ID NO: 355) | H61775_T23 (SEQ ID NO: 346) |

[1273] These sequences are variants of the known protein immunoglobulin superfamily (SEQ ID NO:350), member 9 (SwissProt accession identifier NP_{—}065840), referred to herein as the previously known protein.

[1274] PCT/IB2005/004037 and US Patent Application No. US 2006-0046257, filed on Jan. 27, 2005 and assigned to the applicant of the present invention, disclose the sequences of H61775_T22 (SEQ ID NO:345), and the encoded H61775_P17 (SEQ ID NO:354) of H61775 contig, and assays and methods of use thereof in the diagnosis of lung cancer. WO2005IB0002555 and US Patent Application No. US 2006-0040278, filed on Jan. 27, 2005 and assigned to the applicant of the present invention, disclose the sequences of H61775_T22 (SEQ ID NO:345) and H61775_P17 (SEQ ID NO:354) of H61775 contig, and assays and methods of use thereof in the diagnosis of ovarian cancer.

[1275] Unexpectedly, the sequences of H61775_T22 (SEQ ID NO:345) and H61775_P17 (SEQ ID NO:354) of H61775 contig are now disclosed to be differentially expressed in breast cancer, and therefore may be contemplated within the scope of the present invention as diagnostic markers for this disease.

[1276] Unexpectedly, the previously disclosed sequence of H61775_T23 (SEQ ID NO:346) has now been found to have a variant form, disclosed herein as SEQ ID NO:346. This variant form features a single nucleotide deletion after a base 508. As a result of this deletion, a completely new protein, H61775_P18 (SEQ ID NO:355), has now been found. This protein has a significantly different structure from other members of this protein family. The novel H61775 variant, H61775_T23 (SEQ ID NO:346) and the encoded H61775_P18 (SEQ ID NO:355), are now disclosed as an efficient diagnostic markers for breast cancer, ovarian cancer and lung cancer.

[1277] Cluster H61775 can be used as a diagnostic marker according to overexpression of transcripts of this cluster in cancer. Expression of such transcripts in normal tissues is also given according to the previously described methods. The term “number” in the left hand column of the table and the numbers on the y-axis of the FIG. 42 refer to weighted expression of ESTs in each category, as “parts per million” (ratio of the expression of ESTs for a particular cluster to the expression of all ESTs in that category, according to parts per million).

[1278] Overall, the following results were obtained as shown with regard to the histograms in FIG. 42 and Table 85. This cluster is overexpressed (at least at a minimum level) in the following pathological conditions: brain malignant tumors and a mixture of malignant tumors from different tissues.

TABLE 85
Normal tissue distribution

| Name of Tissue | Number |
|---|---|
| brain | 0 |
| ovary | 0 |
| bladder | 0 |
| general | 3 |
| muscle | 0 |
| pancreas | 0 |
| uterus | 0 |
| colon | 0 |
| prostate | 0 |
| breast | 8 |
| epithelial | 10 |

TABLE 86
P values and ratios for expression in cancerous tissue

| Name of Tissue | P1 | P2 | SP1 | R3 | SP2 | R4 |
|---|---|---|---|---|---|---|
| brain | 4.4e−02 | 1.2e−02 | N/A | N/A | 4.8e−05 | 9.2 |
| ovary | 3.8e−01 | 4.2e−01 | 1.5e−01 | 2.4 | 2.7e−01 | 1.9 |
| bladder | 3.1e−01 | 3.8e−01 | 3.2e−01 | 2.5 | 4.6e−01 | 1.9 |
| general | 1.6e−06 | 8.0e−05 | 2.4e−07 | 5.9 | 4.1e−06 | 3.9 |
| muscle | 2.3e−01 | 2.9e−01 | 1.5e−01 | 6.6 | 4.0e−01 | 2.5 |
| pancreas | 3.1e−01 | 4.2e−01 | 4.2e−01 | 2.4 | 5.3e−01 | 1.9 |
| uterus | 8.7e−02 | 2.3e−01 | 4.4e−01 | 2.1 | 6.4e−01 | 1.5 |
| colon | 4.7e−01 | 5.5e−01 | N/A | N/A | N/A | N/A |
| prostate | 7.1e−01 | 7.6e−01 | 6.7e−01 | 1.5 | 7.5e−01 | 1.3 |
| breast | 4.7e−01 | 4.2e−01 | 3.2e−01 | 2.1 | 4.6e−01 | 1.6 |
| epithelial | 2.6e−02 | 1.3e−01 | 3.3e−02 | 2.0 | 3.7e−01 | 1.1 |

[1279] AS noted above, cluster H61775 features 2 transcript(s), which were listed in Table 82 above. These transcript(s) encode for protein(s) which are variant(s) of protein immunoglobulin superfamily (SEQ ID NO:350), member 9. A description of each variant protein according to the present invention is now provided.

[1280] Variant protein H61775_P17 (SEQ ID NO:354) according to the present invention has an amino acid sequence encoded by transcript(s) H61775_T22 (SEQ ID NO:345). An alignment is given to the known protein (immunoglobulin superfamily member 9, SEQ ID NOs:350-353) in the alignment table on the attached CDROM. A brief description of the relationship of the variant protein according to the present invention to each such aligned protein is as follows:

### 1. Comparison Report Between H61775_P17 (SEQ ID NO:354) and Known Protein(s) NP_{—}065840 (SEQ ID NO: 351):

[1281] A. An isolated chimeric polypeptide encoding for H61775_P17 (SEQ ID NO:354), comprising a first amino acid sequence being at least about 90% homologous to MVWCLGLAVLSLVISQGADGRGKPEVVSVVGRA corresponding to amino acids 1-33 of known protein(s) NP_{—}065840 (SEQ ID NO: 351), which also corresponds to amino acids 1-33 of H61775_P17 (SEQ ID NO:354), a bridging amino acid G corresponding to amino acid 34 of H61775_P17 (SEQ ID NO:354), a second amino acid sequence being at least about 90% homologous to ESVVLGCDLLPPAGRPPLHVIEWLRFGFLLPIFIQFGLYSPRIDPDYVG corresponding to amino acids 35-83 of known protein(s) NP_{—}065840 (SEQ ID NO: 351), which also corresponds to amino acids 35-83 of H61775_P17 (SEQ ID NO:354), and a third amino acid sequence being at least about 70%, optionally at least 80%, preferably at least 85%, more preferably at least 90% and most preferably at least 95% homologous to a polypeptide having the sequence DCGFPAFRELKRAETVSPVFFTRRCIWEDLKSTGFSPAGGGRPPGGGPRTQEDSGLPCWRSSCSVTLQV (SEQ ID NO: 532) corresponding to amino acids 84-152 of H61775_P17 (SEQ ID NO:354), wherein said first amino acid sequence, bridging amino acid, second amino acid sequence and third amino acid sequence are contiguous and in a sequential order.

[1282] B. An isolated polypeptide encoding for an edge portion of H61775_P17 (SEQ ID NO:354), comprising an amino acid sequence being at least about 70%, optionally at least about 80%, preferably at least about 85%, more preferably at least about 90% and most preferably at least about 95% homologous to the sequence

(SEQ ID NO: 532)

DCGFPAFRELKRAETVSPVFFTRRCIWEDLKSTGFSPAGGGRPPGGGPRT
QEDSGLPCWRSSCSVTLQV
of

(SEQ ID NO: 354)

H61775_P17.

### 2. Comparison Report Between H61775_P17 (SEQ ID NO:354) and Known Protein(S) Q9P2J2_Human (SEQ ID NO: 352):

[1283] A. An isolated chimeric polypeptide encoding for H61775_P17 (SEQ ID NO:354), comprising a first amino acid sequence being at least about 90% homologous to MVWCLGLAVLSLVISQGADGRGKPEVVSVVGRAGESVVLGCDLLPPAGRPPLHVIEWLRFGFLLPIFIQFG LYSPRIDPDYVG corresponding to amino acids 11-93 of known protein(s) Q9P2J2_HUMAN (SEQ ID NO: 352), which also corresponds to amino acids 1-83 of H61775_P17 (SEQ ID NO:354), and a second amino acid sequence being at least about 70%, optionally at least 80%, preferably at least 85%, more preferably at least 90% and most preferably at least 95% homologous to a polypeptide having the sequence DCGFPAFRELKRAETVSPVFFTRRCIWEDLKSTGFSPAGGGRPPGGGPRTQEDSGLPCWRSSCSVTLQV (SEQ ID NO: 532) corresponding to amino acids 84-152 of H61775_P17 (SEQ ID NO:354), wherein said, first amino acid sequence and second amino acid sequence are contiguous and in a sequential order.

[1284] B. An isolated polypeptide encoding for an edge portion of H61775_P17 (SEQ ID NO:354), comprising an amino acid sequence being at least about 70%, optionally at least about 80%, preferably at least about 85%, more preferably at least about 90% and most preferably at least about 95% homologous to the sequence

(SEQ ID NO: 532)

DCGFPAFRELKRAETVSPVFFTRRCIWEDLKSTGFSPAGGGRPPGGGPRT
QEDSGLPCWRSSCSVTLQV
of

(SEQ ID NO: 354)

H61775_P17.

[1285] The localization of the variant protein was determined according to results from a number of different software programs and analyses, including analyses from SignalP and other specialized programs. The variant protein is believed to be secreted.

[1286] Variant protein H61775_P17 (SEQ ID NO:354) also has the following non-silent SNPs (Single Nucleotide Polymorphisms) as listed in Table 87, (given according to their position(s) on the amino acid sequence, with the alternative amino acid(s) listed).

TABLE 87
Amino acid mutations

| SNP position(s) on amino acid | |
|---|---|
| sequence | Alternative amino acid(s) |
| 14 | I -> T |
| 34 | G -> E |
| 48 | G -> R |
| 91 | R -> * |
| 138 | G -> R |

[1287] Variant protein H61775_P17 (SEQ ID NO:354) is encoded by the following transcript(s): H61775_T22 (SEQ ID NO:345), for which the coding portion starts at position 261 and ends at position 716. The transcript also has the following SNPs as listed in Table 88 (given according to their position on the nucleotide sequence, with the alternative nucleic acid listed).

TABLE 88
Nucleic acid SNPs

| Polymorphism | SNP position(s) on nucleotide sequence |
|---|---|
| T -> C | 117, 200, 222, 301, 566 |
| G -> A | 361, 377 |
| G -> C | 402, 672 |
| C -> T | 531 |

[1288] Variant protein H61775_P18 (SEQ ID NO:355) according to the present invention has an amino acid sequence encoded by transcript(s) H61775_T23 (SEQ ID NO:346). An alignment is given to the known protein (immunoglobulin superfamily member 9, SEQ ID NOs:350-353) in the alignment table on the attached CDROM. A brief description of the relationship of the variant protein according to the present invention to each such aligned protein is as follows:

1. Comparison Report Between H61775_P18 (SEQ ID NO:355) and known protein(s) NP_{—}065840 (SEQ ID NO: 351):

[1289] A. An isolated chimeric polypeptide encoding for H61775_P18 (SEQ ID NO:355), comprising a first amino acid sequence being at least about 90% homologous to MVWCLGLAVLSLVISQGADGRGKPEVVSVVGRA corresponding to amino acids 1-33 of known protein(s) NP_{—}65840 (SEQ ID NO: 351), which also corresponds to amino acids 1-33 of H61775_P18 (SEQ ID NO:355), a bridging amino acid G corresponding to amino acid 34 of H61775_P18 (SEQ ID NO:355), a second amino acid sequence being at least about 90% homologous to ESVVLGCDLLPPAGRPPLHVIEWLRFGFLLPIFIQFGLYSPRIDPDYVG corresponding to amino acids 35-83 of known protein(s) NP_{—}65840 (SEQ ID NO: 351), which also corresponds to amino acids 35-83 of H61775_P18 (SEQ ID NO:355), and a third amino acid sequence being at least about 70%, optionally at least 80%, preferably at least 85%, more preferably at least 90% and most preferably at least 95% homologous to a polypeptide having the sequence KSSPQVGGREVSARKVGWVESHKASYERLCPCSDLISSSAALTLLNKHGCAPKQC (SEQ ID NO: 505) corresponding to amino acids 84-138 of H61775_P18 (SEQ ID NO:355), wherein said first amino acid sequence, bridging amino acid, second amino acid sequence and third amino acid sequence are contiguous and in a sequential order.

[1290] B. An isolated polypeptide encoding for an edge portion of H61775_P18 (SEQ ID NO:355), comprising an amino acid sequence being at least about 70%, optionally at least about 80%, preferably at least about 85%, more preferably at least about 90% and most preferably at least about 95% homologous to the sequence

(SEQ ID NO: 505)

KSSPQVGGREVSARKVGWVESHKASYERLCPCSDLISSSAALTLLNKHGC
APKQC
of

(SEQ ID NO: 355)

H61775_P18.

### 2. Comparison Report Between H61775_P18 (SEQ ID NO:355) and Known Protein(s) Q9P2J2_HUMAN (SEQ ID NO: 352):

[1291] A. An isolated chimeric polypeptide encoding for H61775_P18 (SEQ ID NO:355), comprising a first amino acid sequence being at least about 90% homologous to MVWCLGLAVLSLVISQGADGRGKPEVVSVVGRAGESVVLGCDLLPPAGRPPLHVIEWLRFGFLLPIFIQFG LYSPRIDPDYVG corresponding to amino acids 11-93 of known protein(s) Q9P2J2_HUMAN (SEQ ID NO: 352), which also corresponds to amino acids 1-83 of H61775_P18 (SEQ ID NO:355), and a second amino acid sequence being at least about 70%, optionally at least 80%, preferably at least 85%, more preferably at least 90% and most preferably at least 95% homologous to a polypeptide having the sequence KSSPQVGGREVSARKVGWVESHKASYERLCPCSDLISSSAALTLLNKHGCAPKQC (SEQ ID NO: 505) corresponding to amino acids 84-138 of H61775_P18 (SEQ ID NO:355), wherein said, first amino acid sequence and second amino acid sequence are contiguous and in a sequential order.

[1292] The localization of the variant protein was determined according to results from a number of different software programs and analyses, including analyses from SignalP and other specialized programs. The variant protein is believed to be secreted.

[1293] Variant protein H61775_P18 (SEQ ID NO:355) also has the following non-silent SNPs (Single Nucleotide Polymorphisms) as listed in Table 89, (given according to their position(s) on the amino acid sequence, with the alternative amino acid(s) listed).

TABLE 89
Amino acid mutations

| SNP position(s) on amino acid | |
|---|---|
| sequence | Alternative amino acid(s) |
| 14 | I -> T |
| 34 | G -> E |
| 48 | G -> R |
| 112 | L -> H |

[1294] Variant protein H61775_P18 (SEQ ID NO:355) is encoded by the following transcript(s): H61775_T23 (SEQ ID NO:346), for which coding portion starts at position 261 and ends at position 674. The transcript also has the following SNPs as listed in Table 90 (given according to their position on the nucleotide sequence, with the alternative nucleic acid listed; H61775_P18 (SEQ ID NO:355).

TABLE 90
Nucleic acid SNPs

| Polymorphism | SNP position(s) on nucleotide sequence |
|---|---|
| T -> C | 117, 200, 222, 301 |
| G -> A | 361, 377 |
| G -> C | 402 |
| T -> A | 595 |

[1295] As noted above, cluster H61775 features 3 segment(s), which were listed in Table 82 above and for which the sequence(s) are given in the Sequence Listing. These segment(s) are portions of nucleic acid sequence(s) which are described herein separately because they are of particular interest. A description of some of these segments according to the present invention is now provided.

[1296] Segment cluster H61775_N6 (SEQ ID NO:347) according to the present invention is supported by 1 libraries. The number of libraries was determined as previously described. This segment can be found in the following transcript(s): H61775_T23 (SEQ ID NO:346). Table 91 below describes the starting and ending position of this segment on each transcript.

TABLE 91
Segment location on transcripts

| | Segment | Segment |
|---|---|---|
| Transcript name | starting position | ending position |
| H61775_T23 (SEQ ID NO: 346) | 514 | 713 |

[1297] Segment Cluster H61775_N8 (SEQ ID NO:348) according to the present invention is supported by 5 libraries. The number of libraries was determined as previously described. This segment can be found in the following transcript(s): H61775_T22 (SEQ ID NO:345). Table 92 below describes the starting and ending position of this segment on each transcript.

TABLE 92
Segment location on transcripts

| | Segment | Segment |
|---|---|---|
| Transcript name | starting position | ending position |
| H61775_T22 (SEQ ID NO: 345) | 508 | 1202 |

[1298] According to an optional embodiment of the present invention, short segments related to the above cluster are also provided. These segments are up to about 120 bp in length, and so are included in a separate description.

[1299] Segment cluster H61775_N5 (SEQ ID NO:349) according to the present invention is supported by 3 libraries. The number of libraries was determined as previously described. This segment can be found in the following transcript(s): H61775 T23 (SEQ ID NO:346). Table 93 below describes the starting and ending position of this segment on each transcript.

TABLE 93
Segment location on transcripts

| | Segment | Segment |
|---|---|---|
| Transcript name | starting position | ending position |
| H61775_T23 (SEQ ID NO: 346) | 508 | 513 |

[1300] Expression of Homo sapiens immunoglobulin superfamily, member 9 (IGSF9) transcripts detectable by or according to segments as described below was measured by real time PCR: seg8—H61775 seg8 (SEQ ID NO: 267) amplicon and primers H61775 seg8F2 (SEQ ID NO: 265) and H61775 seg8R2 (SEQ ID NO: 266); seg12WT-H61775_seg12WT (SEQ ID NO: 270) amplicon and primers H61775_seg12WTF (SEQ ID NO: 268) and H61775_seg12WTR (SEQ ID NO: 269); seg5-6F1R1—H61775_seg5-6F1R1 (SEQ ID NO: 394) amplicon and primers H61775_seg5-6F (SEQ ID NO: 392) and H61775_seg5-6R (SEQ ID NO: 393). The sequences of the corresponding amplicons and primers are given below:

Forward primer H61775 seg8F2 (SEQ ID NO: 265):
GAAGGCTCTTGTCACTTAGTAGCCAT
Reverse primer H61775 seg8R2 (SEQ ID NO: 266):
TGTCACCATATTTAATCCTCCCAA
Amplicon H61775 seg8 (SEQ ID NO: 267):
GAAGGCTCTTGTCACTTACTAGCCATGTGATTTTGGAAAGAAACTTAACA
TTAATTCCTTCAGCTACAATGGAATTCTTGGGAGGATTAAATATGGTGAC
A
Forward Primer (H61775_seg12WTF (SEQ ID NO: 268)):
CCTGCTGTGTTGGAAGTGCA
Reverse Primer (H61775_seg12WTR (SEQ ID NO: 269)):
AAGGTCCTTTCCTCGGAGCT
Amplicon (H61775_seg12WT (SEQ ID NO: 270)):
CCTGCTGTGTTGGAAGTGCAGGAACTGGAGCCTGTGACCCTGCGTTGTGT
GGCCCGTGGCAGCCCCCTGCCTCATGTGACGTGGAAGCTCCGAGGAAAGG
ACCTT
Forward Primer (H61775_seg5-6F) (SEQ ID NO: 392):
GTAAGAGTTCTCCTCAGGTGGGAG
Reverse Primer (H61775_seg5-6R) (SEQ ID NO: 393):
TTAAGGCAGCAGAGCTGGAGAT
Amplicon (H61775_seg5-6F1R1) (SEQ ID NO:394):
GTAAGAGTTCTCCTCAGGTGGGAGGTAGGGAGGTATCAGCAAGAAAGGTG
GGCTGGGTAGAGTCGCACAAGGCCTCCTATGAACGGCTTTGTCCCTGCTC
TGATCTCATCTCCAGCTCTGCTGCCTTAA

Expression of Homo sapiens Immunoglobulin Superfamily, Member 9 (IGSF9) H61775 Transcripts which are Detectable by Amplicon as Depicted in Sequence Name H61775 seg8 (SEQ ID NO: 267) in Normal and Cancerous Breast tissues

[1301] Expression of Homo sapiens immunoglobulin superfamily, member 9 (IGSF9) transcripts detectable by or according to seg8—H61775 seg8 (SEQ ID NO: 267) amplicon and primers H61775 seg8F2 (SEQ ID NO: 265) and H61775 seg8R2 (SEQ ID NO: 266) was measured by real time PCR. In parallel the expression of four housekeeping genes—PBGD (GenBank Accession No. BC019323 (SEQ ID NO:336); amplicon—PBGD-amplicon (SEQ ID NO: 302)), HPRT1 (GenBank Accession No. NM_{—}000194 (SEQ ID NO:337); amplicon—HPRT1-amplicon (SEQ ID NO: 305) (SEQ ID NO: 305)), SDHA (GenBank Accession No. NM_{—}004168 (SEQ ID NO:335); amplicon—SDHA-amplicon (SEQ ID NO:299)), G6PD (GenBank Accession No. NM_{—}000402 (SEQ ID NO:339); G6PD amplicon (SEQ ID NO: 311)), was measured similarly. For each RT sample, the expression of the above amplicon was normalized to the geometric mean of the quantities of the housekeeping genes. The normalized quantity of each RT sample was then divided by the median of the quantities of the normal post-mortem (PM) samples (Sample Nos. 56-60, 63-67, Table 1_{—}3 above), to obtain a value of fold up-regulation for each sample relative to the median of the normal PM samples.

[1302] FIG. 43A is a histogram showing over expression of the Homo sapiens immunoglobulin superfamily, member 9 (IGSF9) transcripts detectable by or according to H61775 seg8 (SEQ ID NO: 267) in cancerous Breast samples relative to the normal samples.

[1303] As is evident from FIG. 43A, the expression of Homo sapiens immunoglobulin superfamily, member 9 (IGSF9) transcripts detectable by the above amplicon in cancer samples was higher than in the non-cancerous samples (Sample Nos. 56-60, 63-67 Table 1_{—}3). Notably an over-expression of at least 5 fold was found in 11 out of 28 adenocarcinoma samples.

[1304] Primer pairs are also optionally and preferably encompassed within the present invention; for example, for the above experiment, the following primer pair was used as a non-limiting illustrative example only of a suitable primer pair: H61775 seg8F2 (SEQ ID NO: 265) forward primer; and H61775 seg8R2 (SEQ ID NO: 266) reverse primer.

[1305] The present invention also preferably encompasses any amplicon obtained through the use of any suitable primer pair; for example, for the above experiment, the following amplicon was obtained as a non-limiting illustrative example only of a suitable amplicon: H61775 seg8 (SEQ ID NO: 267).

[1306] Expression of Homo sapiens immunoglobulin superfamily, member 9 (IGSF9) transcripts detectable by or according to seg8F2R—H61775_seg8F2R2 (SEQ ID NO: 267) amplicon and primers H61775_seg8F2 (SEQ ID NO: 265) and H61775_seg8R2 (SEQ ID NO: 266) was further measured by real time PCR using enlarged panel as shown in Table 1_{—}7. In parallel the expression of four housekeeping genes—G6PD (GenBank Accession No. NM_{—}000402 (SEQ ID NO:339); G6PD amplicon (SEQ ID NO: 311)), RPL19 (GenBank Accession No. NM_{—}000981 (SEQ ID NO:342); RPL19 amplicon (SEQ ID NO: 320)), PBGD (GenBank Accession No. BC019323 (SEQ ID NO:336); amplicon—PBGD-amplicon (SEQ ID NO: 302)) and SDHA (GenBank Accession No. NM_{—}004168 (SEQ ID NO:335); amplicon—SDHA-amplicon (SEQ ID NO:299)) was measured similarly. For each RT sample, the expression of the above amplicon was normalized to the normalization factor calculated from the expression of these house keeping genes as described in normalization method 2 in the “materials and methods” section. The normalized quantity of each RT sample was then divided by the median of the quantities of the normal samples (sample numbers 43, 45, 46, 47, 48, 49, 50, 51, 52, 54, 56, 58, 59, 60, 61, 62, 63, 64, 65, 66, 67, 68 and 69, Table 1_{—}7 above), to obtain a value of fold up-regulation for each sample relative to the median of the normal samples.

[1307] FIG. 43B is a histogram showing low over expression of the above-indicated Homo sapiens immunoglobulin superfamily, member 9 (IGSF9) transcripts in cancerous Breast samples relative to the normal samples.

[1308] As is evident from FIG. 43B, the expression of Homo sapiens immunoglobulin superfamily, member 9 (IGSF9) transcripts detectable by the above amplicon in cancer samples was higher than in the non-cancerous samples (sample numbers 39, 41, 42, 43, 45, 46, 47, 48, 49, 50, 51, 52, 54, 56, 58, 59, 60, 61, 62, 63, 64, 65, 66, 67, 68 and 69, Table 1_{—}7 above). Notably an over-expression of at least 5 fold was found in 14 out of 37 adenocarcinoma samples.

[1309] Statistical analysis was applied to verify the significance of these results, as described below.

[1310] The P value for the difference in the expression levels of Homo sapiens immunoglobulin superfamily, member 9 (IGSF9) transcripts detectable by the above amplicon in Breast cancer samples versus the normal tissue samples was determined by T test as 2.66e-06.

[1311] Threshold of 5 fold over expression was found to differentiate between cancer and normal samples with P value of 2.82e-03 as checked by exact Fisher test.

[1312] The above values demonstrate statistical significance of the results.

[1313] Primer pairs are also optionally and preferably encompassed within the present invention; for example, for the above experiment, the following primer pair was used as a non-limiting illustrative example only of a suitable primer pair: H61775_seg8F2 (SEQ ID NO: 265) forward primer; and H61775_seg8R2 (SEQ ID NO: 266) reverse primer.

[1314] The present invention also preferably encompasses any amplicon obtained through the use of any suitable primer pair; for example, for the above experiment, the following amplicon was obtained as a non-limiting illustrative example only of a suitable amplicon: H61775_seg8F2R2 (SEQ ID NO: 267).

Expression of Homo sapiens Immunoglobulin Superfamily, Member 9 (IGSF9) H61775 Transcripts which are Detectable by Amplicon as Depicted in Sequence name H61775_seg12WT (SEQ ID NO: 270) in Normal and Cancerous Ovary Tissues

[1315] Expression of Homo sapiens immunoglobulin superfamily, member 9 (IGSF9) transcripts detectable by or according to seg12WT—H61775 seg12WT (SEQ ID NO: 270) amplicon and primers H61775_seg12WTF (SEQ ID NO: 268) and H61775_seg12WTR (SEQ ID NO: 269) was measured by real time PCR. In parallel the expression of four housekeeping genes—SDHA (GenBank Accession No. NM_{—}004168 (SEQ ID NO:335); amplicon—SDHA-amplicon (SEQ ID NO:299)), HPRT1 (GenBank Accession No. NM_{—}000194 (SEQ ID NO:337); amplicon—HPRT1-amplicon (SEQ ID NO: 305) (SEQ ID NO: 305)), PBGD (GenBank Accession No. BC019323 (SEQ ID NO:336); amplicon—PBGD-amplicon (SEQ ID NO: 302)) and GAPDH (GenBank Accession No. BC026907 (SEQ ID NO:338); GAPDH amplicon (SEQ ID NO: 308)) was measured similarly. For each RT sample, the expression of the above amplicon was normalized to the geometric mean of the quantities of the housekeeping genes. The normalized quantity of each RT sample was then divided by the median of the quantities of the normal post-mortem (PM) samples (sample numbers 45, 46, 71 and 48, Table 1_{—}1 above), to obtain a value of fold up-regulation for each sample relative to the median of the normal PM samples.

[1316] FIG. 44A is a histogram showing over expression of the Homo sapiens immunoglobulin superfamily, member 9 (IGSF9) transcripts detectable by or according to H61775_seg12WT (SEQ ID NO: 270) in cancerous Ovary samples relative to the normal samples.

[1317] As is evident from FIG. 44A, the expression of Homo sapiens immunoglobulin superfamily, member 9 (IGSF9) transcripts detectable by the above amplicon in adenocarcinoma samples was higher than in the non-cancerous samples (sample numbers 45, 46, 71 and 48, Table 1_{—}1 above). Notably an over-expression of at least 5 fold was found in 31 out of 43 adenocarcinoma samples, specifically in 23 out of 30 serous carcinoma samples and in 5 out of 6 mucinous carcinoma samples.

[1318] Statistical analysis was applied to verify the significance of these results, as described below.

[1319] The P value for the difference in the expression levels of Homo sapiens immunoglobulin superfamily, member 9 (IGSF9) transcripts detectable by the above amplicon in Ovary adenocarcinoma samples versus the normal tissue samples was determined by T test as 4.56e-003. The P value for the difference in the expression levels of Homo sapiens immunoglobulin superfamily, member 9 (IGSF9) transcripts detectable by the above amplicon in Ovary serous carcinoma samples versus the normal tissue samples was determined by T test as 1.96e-003.

[1320] The above values demonstrate statistical significance of the results.

[1321] Primer pairs are also optionally and preferably encompassed within the present invention; for example, for the above experiment, the following primer pair was used as a non-limiting illustrative example only of a suitable primer pair: H61775_seg12WTF (SEQ ID NO: 268) forward primer; and H61775_seg12WTR (SEQ ID NO: 269) reverse primer.

[1322] The present invention also preferably encompasses any amplicon obtained through the use of any suitable primer pair; for example, for the above experiment, the following amplicon was obtained as a non-limiting illustrative example only of a suitable amplicon: H61775_seg12WT (SEQ ID NO: 270).

[1323] Expression of sapiens immunoglobulin superfamily (SEQ ID NO:350), member 9 (IGSF9) transcripts detectable by or according to seg12WT—H61775_seg12WT (SEQ ID NO: 270) amplicon and primers H61775_seg12WTF (SEQ ID NO: 268) and H61775_seg12WTR (SEQ ID NO: 269) was further measured by real time PCR using enlarged panel as shown in Table 1_{—}5. In parallel the expression of four housekeeping genes —SDHA (GenBank Accession No. NM_{—}004168 (SEQ ID NO:335); amplicon—SDHA-amplicon (SEQ ID NO:299)), HPRT1 (GenBank Accession No. NM_{—}000194 (SEQ ID NO:337); amplicon—HPRT1-amplicon (SEQ ID NO: 305) (SEQ ID NO: 305)), G6PD (GenBank Accession No. NM_{—}000402 (SEQ ID NO:339); G6PD amplicon (SEQ ID NO: 311)) was measured similarly. For each RT sample, the expression of the above amplicon was normalized to the normalization factor calculated from the expression of these house keeping genes as described in normalization method 2 in the “materials and methods” section. The normalized quantity of each RT sample was then divided by the median of the quantities of the normal samples (sample numbers 52, 53, 54, 55, 56, 57, 58, 59, 60, 61, 62, 63, 64, 65, 66, 67, 68, 69, 70, 71, 72, 73, 74, 75, 76, 77 and 78, Table 1_{—}5 above), to obtain a value of fold up-regulation for each sample relative to the median of the normal samples.

[1324] As is evident from FIG. 44B, the expression of sapiens immunoglobulin superfamily (SEQ ID NO:350), member 9 (IGSF9) transcripts detectable by the above amplicon in adenocarcinoma samples was significantly higher than in the non-cancerous samples (sample numbers 41, 43-78, Table 1_{—}5 above). Notably an over-expression of at least 5 fold was found in 58 out of 74 adenocarcinoma samples, specifically in 32 out of 38 serous carcinoma samples, in 9 out of 10 endometroid-type adenocarcinoma samples and in 9 out of 12 mucinous carcinoma samples.

[1325] Statistical analysis was applied to verify the significance of these results, as described below.

[1326] The P value for the difference in the expression levels of sapiens immunoglobulin superfamily (SEQ ID NO:350), member 9 (IGSF9) transcripts detectable by the above amplicon in Ovary adenocarcinoma samples versus the non-cancerous tissue samples was determined by T test as 6.25e-13.

[1327] Threshold of 5 fold over expression was found to differentiate between adenocarcinoma and non-cancerous samples with P value of 3.33e-14 as checked by exact Fisher test.

[1328] The above values demonstrate statistical significance of the results.

[1329] Primer pairs are also optionally and preferably encompassed within the present invention; for example, for the above experiment, the following primer pair was used as a non-limiting illustrative example only of a suitable primer pair: H61775_seg12WTF (SEQ ID NO: 268) forward primer; and H61775_seg12WTR (SEQ ID NO: 269) reverse primer.

[1330] The present invention also preferably encompasses any amplicon obtained through the use of any suitable primer pair; for example, for the above experiment, the following amplicon was obtained as a non-limiting illustrative example only of a suitable amplicon: H61775_seg12WT (SEQ ID NO: 270).

Expression of Homo sapiens Immunoglobulin Superfamily, Member 9 (IGSF9) H61775 Transcripts which are Detectable by Amplicon as Depicted in Sequence Name H61775_seg12WT (SEQ ID NO: 270) in Normal and Cancerous Lung Tissues

[1331] Expression of Homo sapiens immunoglobulin superfamily, member 9 (IGSF9) transcripts detectable by or according to seg12WT—H61775_seg12WT (SEQ ID NO: 270) amplicon and primers H61775_seg12WTF (SEQ ID NO: 268) and H61775_seg12WTR (SEQ ID NO: 269) was measured by real time PCR. In parallel the expression of four housekeeping genes—HPRT1 (GenBank Accession No. NM_{—}000194 (SEQ ID NO:337); amplicon—HPRT1-amplicon (SEQ ID NO: 305) (SEQ ID NO: 305)), PBGD (GenBank Accession No. BC019323 (SEQ ID NO:336); amplicon—PBGD-amplicon (SEQ ID NO: 302)), SDHA (GenBank Accession No. NM_{—}004168 (SEQ ID NO:335); amplicon—SDHA-amplicon (SEQ ID NO:299)) and Ubiquitin (GenBank Accession No. BC000449 (SEQ ID NO:341); amplicon—Ubiquitin-amplicon (SEQ ID NO: 317)) was measured similarly. For each RT sample, the expression of the above amplicon was normalized to the geometric mean of the quantities of the housekeeping genes. The normalized quantity of each RT sample was then divided by the median of the quantities of the normal post-mortem (PM) samples (sample numbers 47, 48, 49, 50, 90, 91, 92, 93, 96, 97, 98 and 99, Table 1_{—}2 above), to obtain a value of fold up-regulation for each sample relative to the median of the normal PM samples.

[1332] FIG. 45A is a histogram showing over expression of the Homo sapiens immunoglobulin superfamily, member 9 (IGSF9) transcripts detectable by or according to H61775_seg12WT (SEQ ID NO: 270) in cancerous Lung samples relative to the normal samples.

[1333] As is evident from FIG. 45A, the expression of Homo sapiens immunoglobulin superfamily, member 9 (IGSF9) transcripts detectable by the above amplicon in cancerous samples was significantly higher than in the non-cancerous samples (sample numbers 47, 48, 49, 50, 90, 91, 92, 93, 96, 97, 98 and 99, Table 1_{—}2 above). Notably an over-expression of at least 5 fold was found in 23 out of 35 non-small cell carcinoma samples, specifically in 12 out of 15 adenocarcinoma samples, in 9 out of 16 squamous cell carcinoma samples in 2 out of 4 large cell carcinoma samples. Also 8 out of 8 small cell carcinoma samples showed over expression of at least 5 fold.

[1334] Statistical analysis was applied to verify the significance of these results, as described below.

[1335] The P value for the difference in the expression levels of Homo sapiens immunoglobulin superfamily, member 9 (IGSF9) transcripts detectable by the above amplicon in Lung non-small cell carcinoma samples versus the normal tissue samples was determined by T test as 1.43e-007. The P value for the difference in the expression levels of Homo sapiens immunoglobulin superfamily, member 9 (IGSF9) transcripts detectable by the above amplicon in Lung adenocarcinoma samples versus the normal tissue samples was determined by T test as 3.82e-005. The P value for the difference in the expression levels of Homo sapiens immunoglobulin superfamily, member 9 (IGSF9) transcripts detectable by the above amplicon in Lung squamous cell carcinoma samples versus the normal tissue samples was determined by T test as 1.79e-004. The P value for the difference in the expression levels of Homo sapiens immunoglobulin superfamily, member 9 (IGSF9) transcripts detectable by the above amplicon in Lung small cell carcinoma samples versus the normal tissue samples was determined by T test as 1.77e-003.

[1336] Threshold of 5 fold over expression was found to differentiate between non-small cell carcinoma and normal samples with P value of 5.18e-005 as checked by exact Fisher test. Threshold of 5 fold over expression was found to differentiate between adenocarcinoma and normal samples with P value of 2.62e-005 as checked by exact Fisher test. Threshold of 5 fold over expression was found to differentiate between squamous cell carcinoma and normal samples with P value of 1.66e-003 as checked by exact Fisher test. Threshold of 5 fold over expression was found to differentiate between small cell carcinoma and normal samples with P value of 7.94e-006 as checked by exact Fisher test.

[1337] The above values demonstrate statistical significance of the results.

[1338] Primer pairs are also optionally and preferably encompassed within the present invention; for example, for the above experiment, the following primer pair was used as a non-limiting illustrative example only of a suitable primer pair: H61775_seg12WTF (SEQ ID NO: 268) forward primer; and H61775_seg12WTR (SEQ ID NO: 269) reverse primer.

[1339] The present invention also preferably encompasses any amplicon obtained through the use of any suitable primer pair; for example, for the above experiment, the following amplicon was obtained as a non-limiting illustrative example only of a suitable amplicon: H61775_seg12WT (SEQ ID NO: 270).

[1340] Expression of Homo sapiens immunoglobulin superfamily, member 9 (HGSF9) transcripts detectable by or according to seg12WT-H61775_seg12WT (SEQ ID NO: 270) amplicon and primers H61775_seg12WTF (SEQ ID NO: 268) and H61775_seg12WTR (SEQ ID NO: 269) was further measured by real time PCR using enlarged panel as shown in Table 1_{—}6. In parallel the expression of four housekeeping genes—HPRT1 (GenBank Accession No. NM_{—}000194 (SEQ ID NO:337); amplicon—HPRT1-amplicon (SEQ ID NO: 305) (SEQ ID NO: 305)), PBGD (GenBank Accession No. BC019323 (SEQ ID NO:336); amplicon—PBGD-amplicon (SEQ ID NO: 302)), SDHA (GenBank Accession No. NM_{—}004168 (SEQ ID NO:335); amplicon—SDHA-amplicon (SEQ ID NO:299)) and Ubiquitin (GenBank Accession No. BC000449 (SEQ ID NO:341); amplicon—Ubiquitin-amplicon (SEQ ID NO: 317)) was measured similarly. For each RT sample, the expression of the above amplicon was normalized to the normalization factor calculated from the expression of these house keeping genes as described in normalization method 2 in the “materials and methods” section. The normalized quantity of each RT sample was then divided by the median of the quantities of the samples (sample numbers 51-64, 69 and 70, Table 1_{—}6 above), to obtain a value of fold up-regulation for each sample relative to the median of the normal samples

[1341] FIG. 45B is a histogram showing over expression of the above-indicated Homo sapiens immunoglobulin superfamily, member 9 (IGSF9) transcripts in cancerous Lung samples relative to the normal samples.

[1342] As is evident from FIG. 45B, the expression of Homo sapiens immunoglobulin superfamily, member 9 (IGSF9) transcripts detectable by the above amplicon in small cell carcinoma and non-small cell carcinoma samples was significantly higher than in the non-cancerous samples (sample numbers 51-64, 69 and 70, Table 1_{—}6 above). Notably an over-expression of at least 5 fold was found in 24 out of 39 non-small cell carcinoma samples, specifically in 8 out of 17 adenocarcinoma samples, in 13 out of 16 squamous cell carcinoma samples, and in 3 out of 6 large cell carcinoma samples, and also in 9 out of 9 small cell carcinoma samples and

[1343] Statistical analysis was applied to verify the significance of these results, as described below.

[1344] The P value for the difference in the expression levels of Homo sapiens immunoglobulin superfamily, member 9 (IGSF9) transcripts detectable by the above amplicon in Lung non-small cell carcinoma samples versus the normal tissue samples was determined by T test as 1.16e-06. The P value for the difference in the expression levels of Homo sapiens immunoglobulin superfamily, member 9 (IGSF9) transcripts detectable by the above amplicon in Lung adenocarcinoma samples versus the normal tissue samples was determined by T test as 7.20e-04. The P value for the difference in the expression levels of Homo sapiens immunoglobulin superfamily, member 9 (IGSF9) transcripts detectable by the above amplicon in Lung squamous cell carcinoma samples versus the normal tissue samples was determined by T test as 4.39e-05. The P value for the difference in the expression levels of Homo sapiens immunoglobulin superfamily, member 9 (IGSF9) transcripts detectable by the above amplicon in Lung small cell carcinoma samples versus the normal tissue samples was determined by T test as 4.10e-05.

[1345] Threshold of 5 fold over expression was found to differentiate between non-small cell carcinoma and normal samples with P value of 1.01e-05 as checked by exact Fisher test. Threshold of 5 fold over expression was found to differentiate between adenocarcinoma and normal samples with P value of 1.75e-0 as checked by exact Fisher test. Threshold of 5 fold over expression was found to differentiate between squamous cell carcinoma and normal samples with P value of 1.61e-06 as checked by exact Fisher test. Threshold of 5 fold over expression was found to differentiate between large cell carcinoma and normal samples with P value of 1.30e-02 as checked by exact Fisher test. Threshold of 5 fold over expression was found to differentiate between small cell carcinoma and normal samples with P value of 4.89e-07 as checked by exact Fisher test.

[1346] The above values demonstrate statistical significance of the results.

[1347] Primer pairs are also optionally and preferably encompassed within the present invention; for example, for the above experiment, the following primer pair was used as a non-limiting illustrative example only of a suitable primer pair: H61775_seg12WTF (SEQ ID NO: 268) forward primer; and H61775_seg12WTR (SEQ ID NO: 269) reverse primer.

[1348] The present invention also preferably encompasses any amplicon obtained through the use of any suitable primer pair; for example, for the above experiment, the following amplicon was obtained as a non-limiting illustrative example only of a suitable amplicon: H61775_seg12WT (SEQ ID NO: 270).

Expression of Homo sapiens Immunoglobulin Superfamily, Member 9 (IGSF9) H61775 Transcripts which are Detectable by Amplicon as Depicted in Sequence Name H61775_seg12WT (SEQ ID NO: 270) in Normal and Cancerous Breast Tissues

[1349] Expression of Homo sapiens immunoglobulin superfamily, member 9 (IGSF9) transcripts detectable by or according to seg12WT—H61775_seg12WT (SEQ ID NO: 270) amplicon and primers H61775_seg12WTF (SEQ ID NO: 268) and H61775_seg12WTR (SEQ ID NO: 269) was measured by real time PCR. In parallel the expression of four housekeeping genes—G6PD (GenBank Accession No. NM_{—}000402 (SEQ ID NO:339); G6PD amplicon (SEQ ID NO: 311)), HPRT1 (GenBank Accession No. NM_{—}000194 (SEQ ID NO:337); amplicon—HPRT1-amplicon (SEQ ID NO: 305) (SEQ ID NO: 305)), PBGD (GenBank Accession No. BC019323 (SEQ ID NO:336); amplicon—PBGD-amplicon (SEQ ID NO: 302)) and SDHA (GenBank Accession No. NM_{—}004168 (SEQ ID NO:335); amplicon—SDHA-amplicon (SEQ ID NO:299)) was measured similarly. For each RT sample, the expression of the above amplicon was normalized to the geometric mean of the quantities of the housekeeping genes. The normalized quantity of each RT sample was then divided by the median of the quantities of the normal post-mortem (PM) samples (sample numbers 57, 59, 60, 63, 66, 64, 56, 65, 67 and 58, Table 1_{—}3 above), to obtain a value of fold up-regulation for each sample relative to the median of the normal PM samples.

[1350] FIG. 46 is a histogram showing over expression of the Homo sapiens immunoglobulin superfamily, member 9 (IGSF9) transcripts detectable by or according to H61775_seg12WT (SEQ ID NO: 270) in cancerous Breast samples relative to the normal samples.

[1351] As is evident from FIG. 46, the expression of Homo sapiens immunoglobulin superfamily, member 9 (IGSF9) transcripts detectable by the above amplicon in cancer samples was higher than in the non-cancerous samples (sample numbers 57, 59, 60, 63, 66, 64, 56, 65, 67 and 58, Table 1_{—}3 above). Notably an over-expression of at least 5 fold was found in 7 out of 28 adenocarcinoma samples.

[1352] Statistical analysis was applied to verify the significance of these results, as described below.

[1353] The P value for the difference in the expression levels of Homo sapiens immunoglobulin superfamily, member 9 (IGSF9) transcripts detectable by the above amplicon in Breast cancer samples versus the normal tissue samples was determined by T test as 1.06e-003.

[1354] The above values demonstrate statistical significance of the results.

[1355] Primer pairs are also optionally and preferably encompassed within the present invention; for example, for the above experiment, the following primer pair was used as a non-limiting illustrative example only of a suitable primer pair: H61775_seg12WTF (SEQ ID NO: 268) forward primer; and H61775_seg12WTR (SEQ ID NO: 269) reverse primer.

[1356] The present invention also preferably encompasses any amplicon obtained through the use of any suitable primer pair; for example, for the above experiment, the following amplicon was obtained as a non-limiting illustrative example only of a suitable amplicon: H61775_seg12WT (SEQ ID NO: 270).

Expression of Homo sapiens Immunoglobulin Superfamily, Member 9 (IGSF9) H61775 Transcripts which are Detectable by Amplicon as Depicted in Sequence Name H61775_seg12WT (SEQ ID NO: 270) in Different Normal Tissues

[1357] Expression of Homo sapiens immunoglobulin superfamily, member 9 (IGSF9) transcripts detectable by or according to seg12WT-H61775_seg12WT (SEQ ID NO: 270) amplicon and primers H61775_seg12WTF (SEQ ID NO: 268) and H61775_seg12WTR (SEQ ID NO: 269) was measured by real time PCR. In parallel the expression of four housekeeping genes—SDHA (GenBank Accession No. NM_{—}004168 (SEQ ID NO:335); amplicon—SDHA-amplicon (SEQ ID NO:299)), Ubiquitin (GenBank Accession No. BC000449 (SEQ ID NO:341); amplicon—Ubiquitin-amplicon (SEQ ID NO: 317)), RPL19 (GenBank Accession No. NM_{—}000981 (SEQ ID NO:342); RPL19 amplicon (SEQ ID NO: 320)) and TATA box (GenBank Accession No. NM_{—}003194 (SEQ ID NO:343); TATA amplicon (SEQ ID NO: 323)) was measured similarly. For each RT sample, the expression of the above amplicon was normalized to the geometric mean of the quantities of the housekeeping genes. The normalized quantity of each RT sample was then divided by the median of the quantities of the ovary samples (sample numbers 19 and 20, Table 1_{—}9 above), to obtain a value of relative expression of each sample relative to the median of the ovary samples. FIG. 47A shows expression of Homo sapiens immunoglobulin superfamily, member 9 (IGSF9) H61775 transcripts which are detectable by amplicon as depicted in sequence name H61775_seg12WT (SEQ ID NO: 270) in different normal tissues.

[1358] Expression of Homo sapiens immunoglobulin superfamily, member 9 (IGSF9) transcripts detectable by or according to seg12WT-H61775_seg12WT (SEQ ID NO: 270) amplicon and primers H61775_seg12WTF (SEQ ID NO: 268) and H61775_seg12WTR (SEQ ID NO: 269) was further measured by real time PCR on an updated normal panel, as shown in Table 1_{—}10. In parallel the expression of three housekeeping genes—SDHA (GenBank Accession No. NM_{—}004168 (SEQ ID NO:335); amplicon—SDHA-amplicon (SEQ ID NO:299)), Ubiquitin (GenBank Accession No. BC000449 (SEQ ID NO:341); amplicon—Ubiquitin-amplicon (SEQ ID NO: 317)), and TATA box (GenBank Accession No. NM_{—}003194 (SEQ ID NO:343); TATA amplicon (SEQ ID NO: 323)) was measured similarly. For each RT sample, the expression of the above amplicon was normalized to the normalization factor calculated from the expression of these house keeping genes as described in normalization method 2 in the “materials and methods” section. The normalized quantity of each RT sample was then divided by the median of the quantities of the ovary samples (sample numbers 31, 32, 33 and 34, Table 1_{—}10 above), to obtain a value of relative expression of each sample relative to the median of the ovary samples—as presented in FIG. 47B, or by the median of the quantities of the lung samples (sample numbers 26, 28-30, Table 1_{—}10 above), to obtain a value of relative expression of each sample relative to the median of the lung samples—as presented in FIG. 47C.

Expression of Homo sapiens Immunoglobulin Superfamily, Member 9 (IGSF9) H61775 Transcripts which are Detectable by Amplicon as Depicted in Sequence Name H61775_seg8F2R2 (SEQ ID NO: 267) in Normal and Cancerous Lung Tissues

[1359] Expression of Homo sapiens immunoglobulin superfamily, member 9 (IGSF9) transcripts detectable by or according to seg8F2R2—H61775_seg8F2R2 (SEQ ID NO: 267) amplicon and primers H61775_seg8F2 (SEQ ID NO: 265) and H61775_seg8R2 (SEQ ID NO: 266) was measured by real time PCR. In parallel the expression of four housekeeping genes—HPRT1 (GenBank Accession No. NM_{—}000194 (SEQ ID NO:337); amplicon—HPRT1-amplicon (SEQ ID NO: 305) (SEQ ID NO: 305)), PBGD (GenBank Accession No. BCO 9323 (SEQ ID NO:336); amplicon—PBGD-amplicon (SEQ ID NO: 302)), SDHA (GenBank Accession No. NM_{—}004168 (SEQ ID NO:335); amplicon—SDHA-amplicon (SEQ ID NO:299)) and Ubiquitin (GenBank Accession No. BC000449 (SEQ ID NO:341); amplicon—Ubiquitin-amplicon (SEQ ID NO: 317)) was measured similarly. For each RT sample, the expression of the above amplicon was normalized to the normalization factor calculated from the expression of these house keeping genes as described in normalization method 2 in the “materials and methods” section. The normalized quantity of each RT sample was then divided by the median of the quantities of the samples (sample numbers 51-64, 69 and 70, Table 1_{—}6 above), to obtain a value of fold up-regulation for each sample relative to the median of the normal samples.

[1360] FIG. 48 is a histogram showing over expression of the above-indicated Homo sapiens immunoglobulin superfamily, member 9 (IGSF9) transcripts in cancerous Lung samples relative to the normal samples.

[1361] As is evident from FIG. 48, the expression of Homo sapiens immunoglobulin superfamily, member 9 (IGSF9) transcripts detectable by the above amplicon in small cell carcinoma and non-small cell carcinoma samples was significantly higher than in the non-cancerous samples (sample numbers 51-64, 69 and 70, Table 1_{—}6 above). Notably an over-expression of at least 5 fold was found in 25 out of 53 non-small cell carcinoma samples, specifically in 7 out of 23 adenocarcinoma samples, in 15 out of 24 squamous cell carcinoma samples and in 4 out of 10 large cell carcinoma samples, and also in 9 out of 9 small cell carcinoma samples.

[1362] Statistical analysis was applied to verify the significance of these results, as described below.

[1363] The P value for the difference in the expression levels of Homo sapiens immunoglobulin superfamily, member 9 (IGSF9) transcripts detectable by the above amplicon in all Lung non-small cell carcinoma samples versus the normal tissue samples was determined by T test as 1.42e-07. The P value for the difference in the expression levels of Homo sapiens immunoglobulin superfamily, member 9 (IGSF9) transcripts detectable by the above amplicon in Lung adenocarcinoma samples versus the normal tissue samples was determined by T test as 4.81e-04. The P value for the difference in the expression levels of Homo sapiens immunoglobulin superfamily, member 9 (IGSF9) transcripts detectable by the above amplicon in Lung squamous cell carcinoma samples versus the normal tissue samples was determined by T test as 2.30e-06. The P value for the difference in the expression levels of Homo sapiens immunoglobulin superfamily, member 9 (IGSF9) transcripts detectable by the above amplicon in Lung large cell carcinoma samples versus the normal tissue samples was determined by T test as 3.66e-02. The P value for the difference in the expression levels of Homo sapiens immunoglobulin superfamily, member 9 (IGSF9) transcripts detectable by the above amplicon in Lung small cell carcinoma samples versus the normal tissue samples was determined by T test as 1.24e-03.

[1364] Threshold of 5 fold over expression was found to differentiate between all non-small cell carcinoma and normal samples with P value of 2.85e-04 as checked by exact Fisher test. Threshold of 5 fold over expression was found to differentiate between adenocarcinoma and normal samples with P value of 1.59e-02 as checked by exact Fisher test. Threshold of 5 fold over expression was found to differentiate between squamous cell carcinoma and normal samples with P value of 3.25e-05 as checked by exact Fisher test. Threshold of 5 fold over expression was found to differentiate between large cell carcinoma and normal samples with P value of 1.40e-02 as checked by exact Fisher test. Threshold of 5 fold over expression was found to differentiate between small cell carcinoma and normal samples with P value of 4.89e-07 as checked by exact Fisher test.

[1365] The above values demonstrate statistical significance of the results.

[1366] Primer pairs are also optionally and preferably encompassed within the present invention; for example, for the above experiment, the following primer pair was used as a non-limiting illustrative example only of a suitable primer pair: H61775_seg8F2 (SEQ ID NO: 265) forward primer; and H61775_seg8R2 (SEQ ID NO: 266) reverse primer.

[1367] The present invention also preferably encompasses any amplicon obtained through the use of any suitable primer pair; for example, for the above experiment, the following amplicon was obtained as a non-limiting illustrative example only of a suitable amplicon: H61775_seg8F2R2 (SEQ ID NO: 267).

Expression of Homo sapiens Immunoglobulin Superfamily, Member 9 (IGSF9) H61775 Transcripts which are Detectable by Amplicon as Depicted in Sequence Name H61775_seg8F2R2 (SEQ ID NO: 267) in Different Normal Tissues

[1368] Expression of Homo sapiens immunoglobulin superfamily, member 9 (IGSF9) transcripts detectable by or according to seg8F2R2—H61775_seg8F2R (SEQ ID NO: 267) amplicon and primers H61775_seg8F2 (SEQ ID NO: 265) and H61775_seg8R2 (SEQ ID NO: 266) was measured by real time PCR. In parallel the expression of four housekeeping genes—SDHA (GenBank Accession No. NM_{—}004168 (SEQ ID NO:335); amplicon—SDHA-amplicon (SEQ ID NO:299)), Ubiquitin (GenBank Accession No. BC000449 (SEQ ID NO:341); amplicon—Ubiquitin-amplicon (SEQ ID NO: 317)), and TATA box (GenBank Accession No. NM_{—}003194 (SEQ ID NO:343); TATA amplicon (SEQ ID NO: 323)) was measured similarly. For each RT sample, the expression of the above amplicon was normalized to the normalization factor calculated from the expression of these house keeping genes as described in normalization method 2 in the “materials and methods” section. The normalized quantity of each RT sample was then divided by the median of the quantities of the ovary samples (sample numbers 31, 32, 33 and 34, Table 1_{—}9 above), to obtain a value of relative expression of each sample relative to the median of the ovary samples.

[1369] FIG. 49 demonstrates the Expression of Homo sapiens immunoglobulin superfamily, member 9 (IGSF9) H61775 transcripts which are detectable by amplicon as depicted in sequence name H61775_seg8F2R2 (SEQ ID NO: 267) in different normal tissues.

Expression of Sapiens Immunoglobulin Superfamily (SEQ ID NO:350), Member 9 (IGSF9) H61775 Transcripts which are Detectable by Amplicon as Depicted in Sequence Name H61775_seg8F2R2 (SEQ ID NO: 267) in Normal and Cancerous Ovary Tissues

[1370] Expression of sapiens immunoglobulin superfamily (SEQ ID NO:350), member 9 (IGSF9) transcripts detectable by or according to seg8F2R2—H61775_seg8F2R2 (SEQ ID NO: 267) amplicon and primers H61775_seg8F2 (SEQ ID NO: 265) and H61775_seg8R2 (SEQ ID NO: 266) was measured by real time PCR. In parallel the expression of four housekeeping genes—SDHA (GenBank Accession No. NM_{—}004168 (SEQ ID NO:335); amplicon—SDHA-amplicon (SEQ ID NO:299)), HPRT1 (GenBank Accession No. NM_{—}000194 (SEQ ID NO:337); amplicon—HPRT1-amplicon (SEQ ID NO: 305) (SEQ ID NO: 305)), G6PD (GenBank Accession No. NM_{—}000402 (SEQ ID NO:339); G6PD amplicon (SEQ ID NO: 311)) was measured similarly. For each RT sample, the expression of the above amplicon was normalized to the normalization factor calculated from the expression of these house keeping genes as described in normalization method 2 in the “materials and methods” section. The normalized quantity of each RT sample was then divided by the median of the quantities of the normal samples (sample numbers 52, 53, 54, 55, 56, 57, 58, 59, 60, 61, 62, 63, 64, 65, 66, 67, 68, 69, 70, 71, 72, 73, 74, 75, 76, 77 and 78, Table 1_{—}5 above), to obtain a value of fold up-regulation for each sample relative to the median of the normal samples.

[1371] FIG. 50 is a histogram showing over expression of the sapiens immunoglobulin superfamily (SEQ ID NO:350), member 9 (IGSF9) transcripts in cancerous Ovary samples relative to the non-cancerous samples.

[1372] As is evident from FIG. 50, the expression of sapiens immunoglobulin superfamily (SEQ ID NO:350), member 9 (IGSF9) transcripts detectable by the above amplicon in adenocarcinoma samples was significantly higher than in the non-cancerous samples (sample numbers 41, 43-78, Table 1_{—}5 above). Notably an over-expression of at least 5 fold was found in 55 out of 74 adenocarcinoma samples, specifically in 29 out of 38 serous carcinoma samples, in 8 out of 10 endometroid-type adenocarcinoma samples and in 10 out of 12 mucinous carcinoma samples.

[1373] Statistical analysis was applied to verify the significance of these results, as described below.

[1374] The P value for the difference in the expression levels of sapiens immunoglobulin superfamily (SEQ ID NO:350), member 9 (IGSF9) transcripts detectable by the above amplicon in Ovary adenocarcinoma samples versus the non-cancerous tissue samples was determined by T test as 5.44e-09.

[1375] Threshold of 5 fold over expression was found to differentiate between adenocarcinoma and non-cancerous samples with P value of 9.77e-12 as checked by exact Fisher test.

[1376] The above values demonstrate statistical significance of the results.

[1377] Primer pairs are also optionally and preferably encompassed within the present invention; for example, for the above experiment, the following primer pair was used as a non-limiting illustrative example only of a suitable primer pair: H61775_seg8F2 (SEQ ID NO: 265) forward primer; and H61775_seg8R2 (SEQ ID NO: 266) reverse primer.

[1378] The present invention also preferably encompasses any amplicon obtained through the use of any suitable primer pair; for example, for the above experiment, the following amplicon was obtained as a non-limiting illustrative example only of a suitable amplicon: H61775_seg8F2R2 (SEQ ID NO: 267).

Expression of Homo sapiens Immunoglobulin Superfamily, Member 9 (IGSF9) H61775 Transcripts which are Detectable by Amplicon as Depicted in Sequence Name H61775_seg8F2R2 (SEQ ID NO: 267) in Normal and Cancerous Colon Tissues

[1379] Expression of Homo sapiens immunoglobulin superfamily, member 9 (IGSF9) transcripts detectable by or according to seg8F2R2, H61775_seg8F2R2 (SEQ ID NO: 267) amplicon and primers H61775_seg8F2 (SEQ ID NO: 265) H61775_seg8R2 (SEQ ID NO: 266) was measured by real time PCR. In parallel the expression of three housekeeping genes—PBGD (GenBank Accession No. BC019323 (SEQ ID NO:336); amplicon—PBGD-amplicon (SEQ ID NO: 302)), HPRT1 (GenBank Accession No. NM_{—}000194 (SEQ ID NO:337); amplicon—HPRT1-amplicon (SEQ ID NO: 305) (SEQ ID NO: 305)) and G6PD (GenBank Accession No. NM_{—}000402 (SEQ ID NO:339); G6PD amplicon (SEQ ID NO: 311)) was measured similarly. For each RT sample, the expression of the above amplicon was normalized to the normalization factor calculated from the expression of these house keeping genes as described in normalization method 2 in the “materials and methods” section. The normalized quantity of each RT sample was then divided by the median of the quantities of the normal samples (Sample Nos 52, 42, 43, 44, 45, 46, 47, 48, 49, 50, 51, 53, 54, 55, 56, 57, 58, 59, 60, 61, 62, 63 and 64, Table 1_{—}8, above), to obtain a value of fold differential expression for each sample relative to the median of the normal samples.

[1380] In one experiment that was carried out no differential expression in the cancerous samples relative to the normal samples was observed.

[1381] Primer pairs are also optionally and preferably encompassed within the present invention; for example, for the above experiment, the following primer pair was used as a non-limiting illustrative example only of a suitable primer pair: H61775_seg8F2 (SEQ ID NO: 265) forward primer; and H61775_seg8R2 (SEQ ID NO: 266) reverse primer.

[1382] The present invention also preferably encompasses any amplicon obtained through the use of any suitable primer pair; for example, for the above experiment, the following amplicon was obtained as a non-limiting illustrative example only of a suitable amplicon: H61775_seg8F2R2 (SEQ ID NO: 267).

Expression of Homo sapiens Immunoglobulin Superfamily, Member 9 (IGSF9) H61775 Transcripts which are Detectable by Amplicon as Depicted in Sequence Name H61775_seg5-6F1R1 (SEQ ID NO: 394) in Normal and Cancerous Ovary Tissues

[1383] Expression of Homo sapiens immunoglobulin superfamily, member 9 (IGSF9) transcripts detectable by or according to seg5-6F1R1—H61775_seg5-6F1R1 (SEQ ID NO: 394) amplicon and primers H61775_seg5-6F (SEQ ID NO: 392) and H61775_seg5-6R (SEQ ID NO: 393) was measured by real time PCR. In parallel the expression of three housekeeping genes—SDHA (GenBank Accession No. NM_{—}004168 (SEQ ID NO:335); amplicon—SDHA-amplicon (SEQ ID NO:299)), HPRT1 (GenBank Accession No. NM_{—}000194 (SEQ ID NO:337); amplicon—HPRT1-amplicon (SEQ ID NO: 305) (SEQ ID NO: 305)) and G6PD (GenBank Accession No. NM_{—}000402 (SEQ ID NO:339); G6PD amplicon (SEQ ID NO: 311)) was measured similarly. For each RT sample, the expression of the above amplicon was normalized to the normalization factor calculated from the expression of these house keeping genes as described in normalization method 2 in the “materials and methods” section. The normalized quantity of each RT sample was then divided by the median of the quantities of the normal samples (sample numbers 52, 53, 54, 55, 56, 57, 58, 59, 60, 61, 62, 63, 64, 65, 66, 67, 68, 69, 70, 71, 72, 73, 74, 75, 76, 77 and 78, Table 1_{—}5 above), to obtain a value of fold up-regulation for each sample relative to the median of the normal samples.

[1384] FIG. 51 is a histogram showing over expression of the above-indicated Homo sapiens immunoglobulin superfamily, member 9 (IGSF9) transcripts in cancerous Ovary samples relative to the normal samples.

[1385] As is evident from FIG. 51, the expression of Homo sapiens immunoglobulin superfamily, member 9 (IGSF9) transcripts detectable by the above amplicon in adenocarcinoma samples was significantly higher than in the non-cancerous samples (sample numbers 52, 53, 54, 55, 56, 57, 58, 59, 60, 61, 62, 63, 64, 65, 66, 67, 68, 69, 70, 71, 72, 73, 74, 75, 76, 77 and 78, Table 1_{—}5 above). Notably an over-expression of at least 7 fold was found in 26 out of 40 adenocarcinoma samples, specifically in 13 out of 18 serous carcinoma samples, in 6 out of 9 mucinous carcinoma samples, and in 6 out of 10 endometroid samples.

[1386] Statistical analysis was applied to verify the significance of these results, as described below.

[1387] The P value for the difference in the expression levels of Homo sapiens immunoglobulin superfamily, member 9 (IGSF9) transcripts detectable by the above amplicon in Ovary adenocarcinoma samples versus the normal tissue samples was determined by T test as 1.59e-006. The P value for the difference in the expression levels of Homo sapiens immunoglobulin superfamily, member 9 (IGSF9) transcripts detectable by the above amplicon in Ovary serous carcinoma samples versus the normal tissue samples was determined by T test as 5.56e-04. The P value for the difference in the expression levels of Homo sapiens immunoglobulin superfamily, member 9 (IGSF9) transcripts detectable by the above amplicon in Ovary mucinous carcinoma samples versus the normal tissue samples was determined by T test as 3.07e-002. The P value for the difference in the expression levels of Homo sapiens immunoglobulin superfamily, member 9 (IGSF9) transcripts detectable by the above amplicon in Ovary endometroid samples versus the normal tissue samples was determined by T test as 3.16e-002.

[1388] Threshold of 7 fold over expression was found to differentiate between adenocarcinoma and normal samples with P value of 8.58e-009 as checked by exact Fisher test. Threshold of 7 fold over expression was found to differentiate between serous carcinoma and normal samples with P value of 1.17e-07 as checked by exact Fisher test. Threshold of 7 fold over expression was found to differentiate between mucinous carcinoma and normal samples with P value of 4.31e-005 as checked by exact Fisher test. Threshold of 7 fold over expression was found to differentiate between endometroid and normal samples with P value of 9.03e-005 as checked by exact Fisher test.

[1389] The above values demonstrate statistical significance of the results.

[1390] Primer pairs are also optionally and preferably encompassed within the present invention; for example, for the above experiment, the following primer pair was used as a non-limiting illustrative example only of a suitable primer pair: H61775_seg5-6F (SEQ ID NO: 392) forward primer; and H61775_seg5-6R (SEQ ID NO: 393) reverse primer.

[1391] The present invention also preferably encompasses any amplicon obtained through the use of any suitable primer pair; for example, for the above experiment, the following amplicon was obtained as a non-limiting illustrative example only of a suitable amplicon: H61775_seg5-6F1R1 (SEQ ID NO: 394).

Expression of Homo sapiens Immunoglobulin Superfamily, Member 9 (IGSF9) H61775 Transcripts which are Detectable by Amplicon as Depicted in Sequence Name H61775_seg5-6 (SEQ ID NO: 394) in Normal and Cancerous Lung Tissues

[1392] Expression of Homo sapiens immunoglobulin superfamily, member 9 (IGSF9) transcripts detectable by or according to seg5-6—H61775_seg5-6 (SEQ ID NO: 394) amplicon and primers H61775_seg5-6F (SEQ ID NO: 392) and H61775_seg5-6R (SEQ ID NO: 393) was measured by real time PCR. In parallel the expression of four housekeeping genes—HPRT1 (GenBank Accession No. NM_{—}000194 (SEQ ID NO:337); amplicon—HPRT1-amplicon (SEQ ID NO: 305) (SEQ ID NO: 305)), PBGD (GenBank Accession No. BC019323 (SEQ ID NO:336); amplicon—PBGD-amplicon (SEQ ID NO: 302)), SDHA (GenBank Accession No. NM_{—}004168 (SEQ ID NO:335); amplicon—SDHA-amplicon (SEQ ID NO:299)) and Ubiquitin (GenBank Accession No. BC000449 (SEQ ID NO:341); amplicon—Ubiquitin-amplicon (SEQ ID NO: 317)) was measured similarly. For each RT sample, the expression of the above amplicon was normalized to the normalization factor calculated from the expression of these house keeping genes as described in normalization method 2 in the “materials and methods” section. The normalized quantity of each RT sample was then divided by the median of the quantities of the normal samples (sample numbers 51, 52, 53, 54, 55, 56, 57, 58, 59, 60, 61, 62, 63, 64, 69 and 70, Table 1_{—}6 above), to obtain a value of fold up-regulation for each sample relative to the median of the normal samples.

[1393] FIG. 52 is a histogram showing over expression of the above-indicated Homo sapiens immunoglobulin superfamily, member 9 (IGSF9) transcripts in cancerous Lung samples relative to the normal samples.

[1394] As is evident from FIG. 52, the expression of Homo sapiens immunoglobulin superfamily, member 9 (IGSF9) transcripts detectable by the above amplicon in small cell carcinoma and non-small cell carcinoma samples was significantly higher than in the non-cancerous samples (sample numbers 51, 52, 53, 54, 55, 56, 57, 58, 59, 60, 61, 62, 63, 64, 69 and 70, Table 1_{—}6 above). Notably an over-expression of at least 10 fold was found in 11 out of 39 non-small cell carcinoma samples, specifically in 6 out of 16 squamous cell carcinoma samples, in 3 out of 6 large cell carcinoma samples, and also in 9 out of 9 small cell carcinoma samples.

[1395] Statistical analysis was applied to verify the significance of these results, as described below.

[1396] The P value for the difference in the expression levels of Homo sapiens immunoglobulin superfamily, member 9 (IGSF9) transcripts detectable by the above amplicon in Lung non-small cell carcinoma samples versus the normal tissue samples was determined by T test as 4.37e-005. The P value for the difference in the expression levels of Homo sapiens immunoglobulin superfamily, member 9 (IGSF9) transcripts detectable by the above amplicon in Lung adenocarcinoma samples versus the normal tissue samples was determined by T test as 1.72e-002. The P value for the difference in the expression levels of Homo sapiens immunoglobulin superfamily, member 9 (IGSF9) transcripts detectable by the above amplicon in Lung squamous cell carcinoma samples versus the normal tissue samples was determined by T test as 2.11e-004. The P value for the difference in the expression levels of Homo sapiens immunoglobulin superfamily, member 9 (IGSF9) transcripts detectable by the above amplicon in Lung small cell carcinoma samples versus the normal tissue samples was determined by T test as 5.35e-004.

[1397] Threshold of 10 fold over expression was found to differentiate between non-small cell carcinoma and normal samples with P value of 1.40e-002 as checked by exact Fisher test. Threshold of 10 fold over expression was found to differentiate between squamous cell carcinoma and normal samples with P value of 8.84e-003 as checked by exact Fisher test. Threshold of 10 fold over expression was found to differentiate between large cell carcinoma and normal samples with P value of 1.30e-002 as checked by exact Fisher test. Threshold of 10 fold over expression was found to differentiate between small cell carcinoma and normal samples with P value of 4.89e-007 as checked by exact Fisher test.

[1398] The above values demonstrate statistical significance of the results.

[1399] Primer pairs are also optionally and preferably encompassed within the present invention; for example, for the above experiment, the following primer pair was used as a non-limiting illustrative example only of a suitable primer pair: H61775_seg5-6F (SEQ ID NO: 392) forward primer; and H61775_seg5-6R (SEQ ID NO: 393) reverse primer.

[1400] The present invention also preferably encompasses any amplicon obtained through the use of any suitable primer pair; for example, for the above experiment, the following amplicon was obtained as a non-limiting illustrative example only of a suitable amplicon: H61775_seg5-6 (SEQ ID NO: 394).

[1401] Expression of Homo sapiens Immunoglobulin Superfamily, Member 9 (IGSF9) H61775 Transcripts which are Detectable by Amplicon as Depicted in Sequence Name H61775_seg5-6 (SEQ ID NO: 394) in Different Normal Tissues

[1402] Expression of Homo sapiens immunoglobulin superfamily, member 9 (IGSF9) transcripts detectable by or according to seg5-6—H61775 seg5-6 (SEQ ID NO: 394) amplicon and primers H61775 seg5-6F (SEQ ID NO: 392) and H61775 seg5-6R (SEQ ID NO: 393) was measured by real time PCR. In parallel the expression of four housekeeping genes—SDHA (GenBank Accession No. NM_{—}004168 (SEQ ID NO:335); amplicon—SDHA-amplicon (SEQ ID NO:299)), Ubiquitin (GenBank Accession No. BC000449 (SEQ ID NO:341); amplicon—Ubiquitin-amplicon (SEQ ID NO: 317)), RPL19 (GenBank Accession No. NM_{—}000981 (SEQ ID NO:342); RPL19 amplicon (SEQ ID NO: 320)) and TATA box (GenBank Accession No. NM_{—}003194 (SEQ ID NO:343); TATA amplicon (SEQ ID NO: 323)) was measured similarly. For each RT sample, the expression of the above amplicon was normalized to the normalization factor calculated from the expression of these house keeping genes as described in normalization method 2 in the “materials and methods” section. The normalized quantity of each RT sample was then divided by the median of the quantities of the ovary samples (sample numbers 31-34, Table 1_{—}10 above), to obtain a value of relative expression of each sample relative to the median of the lung samples. FIG. 53 is a histogram showing expression of Homo sapiens immunoglobulin superfamily, member 9 (IGSF9) H61775 transcripts which are detectable by amplicon as depicted in sequence name H61775_seg5-6F1R1 (SEQ ID NO: 394) in different normal tissues.

[1403] Expression of Homo sapiens Immunoglobulin Superfamily, member 9 (IGSF9) H61775 Transcripts which are Detectable by Amplicon as Depicted in Sequence Name H61775_seg5-6F1R1 (SEQ ID NO: 394) in Normal and Cancerous Breast Tissues

[1404] Expression of Homo sapiens immunoglobulin superfamily, member 9 (IGSF9) transcripts detectable by or according to H61775_seg5-6F1R1 (SEQ ID NO: 394), amplicon and primers H61775_seg5-6F (SEQ ID NO: 392) H61775_seg5-6R (SEQ ID NO: 393) was measured by real time PCR. In parallel the expression of four housekeeping genes—PBGD (GenBank Accession No. BC019323 (SEQ ID NO:336); amplicon—PBGD-amplicon (SEQ ID NO: 302)), SDHA (GenBank Accession No. NM_{—}004168 (SEQ ID NO:335); amplicon—SDHA-amplicon (SEQ ID NO:299)), G6PD (GenBank Accession No. NM_{—}000402 (SEQ ID NO:339); G6PD amplicon (SEQ ID NO: 311)) and RPL19 (GenBank Accession No. NM_{—}000981 (SEQ ID NO:342); RPL19 amplicon (SEQ ID NO: 320)) was measured similarly. For each RT sample, the expression of the above amplicon was normalized to normalization factor calculated from the expression of these house keeping genes as described in normalization method 2 in the “materials and methods” section. The normalized quantity of each RT sample was then divided by the median of the quantities of the normal samples (Sample Nos. 43, 45, 46, 47, 48, 49, 50, 51, 52, 54, 56, 58, 59, 60, 61, 62, 63, 64, 65, 66, 67, 68 and 69, Table 1_{—}7, above), to obtain a value of fold differential expression for each sample relative to the median of the normal samples.

[1405] FIG. 54 is a histogram showing low over expression of the above-indicated Homo sapiens immunoglobulin superfamily, member 9 (IGSF9) transcripts in cancerous Breast samples relative to the normal samples.

[1406] As is evident from FIG. 54, the expression of Homo sapiens immunoglobulin superfamily, member 9 (IGSF9) transcripts detectable by the above amplicon was higher in several cancer samples than in the non-cancerous samples (sample numbers 39, 41, 42, 43, 45, 46, 47, 48, 49, 50, 51, 52, 54, 56, 58, 59, 60, 61, 62, 63, 64, 65, 66, 67, 68 and 69, Table 1_{—}7 above). Notably an over-expression of at least 5 fold was found in 7 out of 37 adenocarcinoma samples.

[1407] Statistical analysis was applied to verify the significance of these results, as described below.

[1408] The P value for the difference in the expression levels of Homo sapiens immunoglobulin superfamily, member 9 (IGSF9) transcripts detectable by the above amplicon in Breast cancer samples versus the normal tissue samples was determined by T test as 9.00e-03.

[1409] The above values demonstrate statistical significance of the results.

[1410] Primer pairs are also optionally and preferably encompassed within the present invention; for example, for the above experiment, the following primer pair was used as a non-limiting illustrative example only of a suitable primer pair: [H61775_seg5-6F (SEQ ID NO: 392) forward primer; and H61775_seg5-6R (SEQ ID NO: 393) reverse primer.

[1411] The present invention also preferably encompasses any amplicon obtained through the use of any suitable primer pair; for example, for the above experiment, the following amplicon was obtained as a non-limiting illustrative example only of a suitable amplicon: H61775_seg5-6F1R1 (SEQ ID NO: 394).

### Description for Cluster HUMPAX8A

[1412] Cluster HUMPAX8A features 4 transcript(s) and 13 segment(s) of interest, the names for which are given in Tables 94 and 95, respectively, the sequences themselves are given in the “Sequence Listing” of the application. The selected protein variants are given in table 96.

TABLE 94
Transcripts of interest
Transcript Name

HUMPAX8A_T21 (SEQ ID NO: 421)
HUMPAX8A_T24 (SEQ ID NO: 156)
HUMPAX8A_T26 (SEQ ID NO: 157)
HUMPAX8A_T30 (SEQ ID NO: 158)

TABLE 95
Segments of interest
Segment Name

HUMPAX8A_N5 (SEQ ID NO: 159)
HUMPAX8A_N6 (SEQ ID NO: 160)
HUMPAX8A_N9 (SEQ ID NO: 161)
HUMPAX8A_N16 (SEQ ID NO: 162)
HUMPAX8A_N17 (SEQ ID NO: 163)
HUMPAX8A_N18 (SEQ ID NO: 164)
HUMPAX8A_N19 (SEQ ID NO: 165)
HUMPAX8A_N21 (SEQ ID NO: 166)
HUMPAX8A_N0 (SEQ ID NO: 167)
HUMPAX8A_N2 (SEQ ID NO: 168)
HUMPAX8A_N8 (SEQ ID NO: 169)
HUMPAX8A_N13 (SEQ ID NO: 170)
HUMPAX8A_N20 (SEQ ID NO: 171)

TABLE 96
Proteins of interest

| Protein Name | Corresponding Transcript(s) |
|---|---|
| HUMPAX8A_P33 (SEQ ID | HUMPAX8A_T26 (SEQ ID NO: 157) |
| NO: 183) | |
| HUMPAX8A_P36 (SEQ ID | HUMPAX8A_T21 (SEQ ID NO: 421) |
| NO: 184) | |
| HUMPAX8A_P37 (SEQ ID | HUMPAX8A_T24 (SEQ ID NO: 156) |
| NO: 185) | |
| HUMPAX8A_P40 (SEQ ID | HUMPAX8A_T30 (SEQ ID NO: 158) |
| NO: 186) | |

[1413] These sequences are variants of the known protein Paired box protein Pax-8 (SEQ ID NO: 172) (SwissProt accession identifier PAX8-HUMAN), referred to herein as the previously known protein.

[1414] Protein Paired box protein Pax-8 (SEQ ID NO: 172) is known or believed to have the following function(s): Transcription factor for the thyroid-specific expression of the genes exclusively expressed in the thyroid cell type, maintaining the functional differentiation of such cells. Known polymorphisms for this sequence are as shown in Table 97.

TABLE 97
Amino acid mutations for Known Protein

| SNP position(s) | |
|---|---|
| on amino | |
| acid sequence | Comment |
| 31 | R -> H (in TD; loss of activity). /FTId = VAR_012769 |
| 40 | Q -> P (in TD; loss of activity). /FTId = VAR_012770 |
| 57 | C -> Y (in TD; loss of activity). /FTId = VAR_012771 |
| 62 | L -> R (in TD; loss of activity). /FTId = VAR_012772 |
| 329 | F -> L. /FTId = VAR_012773 |
| 300 | Missing |
| 418 | G -> R |

[1415] Protein Paired box protein Pax-8 (SEQ ID NO: 172) localization is believed to be Nuclear.

[1416] PCT/US05/03002 and U.S. patent application Ser. No. 11/051,646, filed on Jan. 27, 2005 and assigned to the applicant of the present invention, disclose polynucleotides of HUMPAX8A contig, and assays and methods of use thereof in the diagnosis using NAT based technologies. In this application the HUMPAX8A polynucleotides are described as being overexpressed in epithelial malignant tumors, a mixture of malignant tumors from different tissues, ovarian carcinoma and uterine malignancies.

[1417] In addition, HLMPAX8A_P36 was previously disclosed by the inventors in published PCT application no WO2005/071058, hereby incorporated by reference as if fully set forth herein.

[1418] Unexpectedly, novel HUMPAX8A variant polynucleotides and their respective encoded polypeptides were identified and are now provided. The novel HUMPAX8A variants are now disclosed to be differentially expressed in ovarian cancer, and therefore may be contemplated within the scope of the present invention as diagnostic markers for this disease. Surprisingly, novel HUMPAX8A variants demonstrated an age related differential diagnostic capability. Also HUMPAX8A_P36 was now surprisingly found by the inventors to be differential diagnostic capability for ovarian cancer and therefore may be contemplated within the scope of the present invention as a diagnostic marker for this disease. Therefore, the present invention further provides diagnostic methods, kits and assays for diagnosis, assessment and prognostic indications regarding to ovarian cancer, according to the age of the subject, as described herein.

[1419] Cluster HUMPAX8A can be used as a diagnostic marker according to overexpression of transcripts of this cluster in cancer. Expression of such transcripts in normal tissues is also given according to the previously described methods. The term “number” in the left hand column of the table and the numbers on the y-axis of FIG. 55 refer to weighted expression of ESTs in each category, as “parts per million” (ratio of the expression of ESTs for a particular cluster to the expression of all ESTs in that category, according to parts per million).

[1420] Overall, the following results were obtained as shown with regard to the histograms in FIG. 55 and Table 98. This cluster is overexpressed (at least at a minimum level) in the following pathological conditions: ovarian carcinoma, a mixture of malignant tumors from different tissues, uterine malignancies and epithelial malignant tumors.

TABLE 98
Normal tissue distribution

| Name of Tissue | Number |
|---|---|
| brain | 10 |
| ovary | 7 |
| lung | 10 |
| general | 24 |
| bone marrow | 0 |
| Thyroid | 408 |
| skin | 40 |
| muscle | 1 |
| pancreas | 10 |
| uterus | 76 |
| colon | 153 |
| kidney | 425 |
| breast | 0 |
| stomach | 0 |
| epithelial | 61 |

TABLE 99
P values and ratios for expression in cancerous tissue

| Name of Tissue | P1 | P2 | SP1 | R3 | SP2 | R4 |
|---|---|---|---|---|---|---|
| brain | 8.0e−01 | 3.6e−01 | 6.1e−01 | 1.0 | 3.9e−01 | 1.3 |
| ovary | 5.6e−02 | 5.2e−02 | 1.0e−02 | 4.8 | 1.0e−03 | 4.5 |
| lung | 3.0e−01 | 5.1e−01 | 6.5e−01 | 1.4 | 8.5e−01 | 0.9 |
| general | 1.1e−08 | 1.4e−05 | 1.6e−23 | 4.1 | 1.7e−12 | 2.6 |
| bone marrow | N/A | 7.1e−01 | N/A | N/A | 5.4e−01 | 1.9 |
| Thyroid | 3.3e−01 | 3.3e−01 | 6.8e−01 | 0.9 | 6.8e−01 | 0.9 |
| skin | 3.8e−01 | 6.7e−01 | 1.6e−01 | 3.2 | 9.4e−01 | 0.5 |
| muscle | 1.7e−01 | 2.3e−01 | 1.5e−01 | 6.5 | 4.0e−01 | 2.4 |
| pancreas | 2.4e−01 | 3.8e−01 | 2.1e−01 | 2.5 | 3.5e−01 | 1.9 |
| uterus | 1.4e−02 | 1.3e−01 | 1.8e−05 | 3.8 | 9.0e−03 | 2.1 |
| colon | 4.9e−01 | 3.5e−01 | 1.0e+00 | 0.2 | 1.0e+00 | 0.2 |
| kidney | 2.5e−01 | 4.3e−01 | 9.8e−01 | 0.5 | 9.9e−01 | 0.4 |
| breast | 3.6e−01 | 4.8e−01 | N/A | N/A | N/A | N/A |
| stomach | 2.7e−01 | 6.4e−01 | 2.5e−01 | 3.0 | 6.3e−01 | 1.5 |
| epithelial | 4.9e−05 | 6.7e−03 | 6.2e−04 | 1.6 | 1.7e−01 | 1.1 |

[1421] As noted above, cluster HUMPAX8A features 4 transcript(s), which were listed in Table 94 above. These transcript(s) encode for protein(s) which are variant(s) of protein Paired box protein Pax-8 (SEQ ID NO: 172). A description of each variant protein according to the present invention is now provided.

[1422] Variant protein HUMPAX8A_P33 (SEQ ID NO: 183) according to the present invention has an amino acid sequence as given in the “Sequence Listing” of the application; it is encoded by transcript(s) HUMPAX8A_T26 (SEQ ID NO: 157). An alignment is given to the known protein (Paired box protein Pax-8, SEQ ID NOs:172-182) in the alignment table, on the attached CDROM. One or more alignments to one or more previously published protein sequences are given in the alignment table, on the attached CDROM. A brief description of the relationship of the variant protein according to the present invention to each such aligned protein is as follows:

1. Comparison Report Between HUMPAX8A_P33 (SEQ ID NO: 183) and Q06710-5 (SEQ ID NO: 178) (or NP_{—}054698 (SEQ ID NO: 181), NP_{—}039247 (SEQ ID NO: 180), Q06710-4 (SEQ ID NO: 176), NP_{—}039245 (SEQ ID NO: 179), Q06710-2 (SEQ ID NO: 175), or NP 039246 (SEQ ID NO: 173)):

[1423] A. An isolated chimeric polypeptide encoding for HUMPAX8A_P33 (SEQ ID NO: 183), comprising a first amino acid sequence being at least about 90% homologous to MPHNSIRSGHGGLNQLGGAFVNGRPLPEVVRQRIVDLAHQGVRPCDISRQLRVSHGCVSKILGRYYETGSI RPGVIGGSKPKVATPKVVEKIGDYKRQNPTMFAWEIRDRLLAEGVCDNDTVPSVSSINRIIRTKVQQPFNLP MDSCVATKSLSPGHTLIPSSAVTPPESPQSDSLGSTYSINGLLGIAQPGSDKRKMDDS corresponding to amino acids 1-201 of Q06710-5 (SEQ ID NO: 178), which also corresponds to amino acids 1-201 of HUMPAX8A_P33 (SEQ ID NO: 183), and a second amino acid sequence being at least about 70%, optionally at least 80%, preferably at least 85%, more preferably at least 90% and most preferably at least 95% homologous to a polypeptide having the sequence ECWDRRAAGGAREQFAQALMGTETLPLMIWDFVGALHVTVTCPVPQLAKAPGPTWLALFLPPQ (SEQ ID NO: 506) corresponding to amino acids 202-264 of HUMPAX8A_P33 (SEQ ID NO: 183), wherein said first amino acid sequence and second amino acid sequence are contiguous and in a sequential order.

[1424] B. An isolated polypeptide encoding for an edge portion of HUMPAX8A_P33 (SEQ ID NO: 183), comprising an amino acid sequence being at least about 70%, optionally at least about 80%, preferably at least about 85%, more preferably at least about 90% and most preferably at least about 95% homologous to the sequence

(SEQ ID NO: 506)

ECWDRRAAGGAREQFAQALMGTETLPLMIWDFVGALHVTVTCPVPQLAKA
PGPTWLALFLPPQ
of

(SEQ ID NO: 183)

HUMPAX8A_P33.

[1425] The localization of the variant protein was determined according to results from a number of different software programs and analyses, including analyses from SignalP and other specialized programs. The variant protein is believed to be located intracellularly with regard to the cell.

[1426] Variant protein HUMPAX8A_P33 (SEQ ID NO: 183) is encoded by the following transcript(s): HUMPAX8A_T26 (SEQ ID NO: 157), for which coding portion starts at position 168 and ends at position 959. The transcript also has the following SNPs as listed in Table 100 (given according to their position on the nucleotide sequence, with the alternative nucleic acid listed).

TABLE 100
Nucleic acid SNPs

| | SNP position(s) on nucleotide |
|---|---|
| Polymorphism | sequence |
| G -> | 42 |
| A -> G | 4685 |

[1427] Variant protein HUMPAX8A_P36 (SEQ ID NO: 184) according to the present invention has an amino acid sequence as given in the “Sequence Listing” of the application; it is encoded by transcript(s) HUMPAX8A_T21 (SEQ ID NO: 421). An alignment is given to the known protein (Paired box protein Pax-8 (SEQ ID NO: 172) SEQ ID NOs:172-182) in the alignment table, on the attached CDROM. One or more alignments to one or more previously published protein sequences are given in the alignment table, on the attached CDROM. A brief description of the relationship of the variant protein according to the present invention to each such aligned protein is as follows:

1. Comparison Report Between HUMPAX8A_P36 (SEQ ID NO: 184) and PAX8_HUMAN (SEQ ID NO:422) (or Q06710-5 (SEQ ID NO: 178), NP_{—}054698 (SEQ ID NO: 181), NP_{—}039247 (SEQ ID NO: 180), Q06710-4 (SEQ ID NO: 176), NP_{—}039245 (SEQ ID NO: 179), Q06710-2 (SEQ ID NO: 175), Q4ZG35_HUMAN (SEQ ID NO: 177), NP_{—}003457 (SEQ ID NO: 182) or NP_{—}039246 (SEQ ID NO: 173)):

[1428] A. An isolated chimeric polypeptide encoding for HUMPAX8A_P36 (SEQ ID NO: 184), comprising a first amino acid sequence being at least about 90% homologous to MPHNSIRSGHGGLNQLGGAFVNGRPLPEVVRQRIVDLAHQGVRPCDISRQLRVSHGCVSKILGRYYETGSI RPGVIGGSKPKVATPKVVEKIGDYKRQNPTMFAWEIRDRLLAEGVCDNDTVPSVSSDIRIIRTKVQQPFNLP MDSCVATKSLSPGHTLIPSSAVTPPESPQSDSLGSTYSINGLLGIAQPGSDKRKMDDSDQDSCRLSIDSQSSS SGPRKHLRTDAFSQHHLEPLECPFERQHYPEAYASPSHTKGEQ corresponding to amino acids 1-259 of PAX8_HUMAN (SEQ ID NO:422), which also corresponds to amino acids 1-259 of HUMPAX8A_P36 (SEQ ID NO: 184), and a second amino acid sequence being at least about 70%, optionally at least 80%, preferably at least 85%, more preferably at least 90% and most preferably at least 95% homologous to a polypeptide having the sequence VRSWALGGEQGGQGPEKVYSPNEPVLHQSSWKLHQWAQGTCLMQLQA (SEQ ID NO: 507) corresponding to amino acids 260-306 of HUMPAX8A_P36 (SEQ ID NO: 184), wherein said first amino acid sequence and second amino acid sequence are contiguous and in a sequential order.

[1429] B. An isolated polypeptide encoding for an edge portion of HUMPAX8A_P36 (SEQ ID NO: 184), comprising an amino acid sequence being at least about 70%, optionally at least about 80%, preferably at least about 85%, more preferably at least about 90% and most preferably at least about 95% homologous to the sequence

(SEQ ID NO: 507)

VRSWALGGEQGGQGPEKVYSPNEPVLHQSSWKLHQWAQGTCLMQLQA
of

(SEQ ID NO: 184)

HUMPAX8A_P36.

[1430] The localization of the variant protein was determined according to results from a number of different software programs and analyses, including analyses from SignalP and other specialized programs. The variant protein is believed to be located intracellularly with regard to the cell.

[1431] Variant protein HUMPAX8A_P36 (SEQ ID NO: 184) is encoded by the following transcript(s): HUMPAX8A_T21 (SEQ ID NO: 421), for coding portion starts at position 168 and ends at position 1085. The transcript also has the following SNPs as listed in Table 101 (given according to their position on the nucleotide sequence, with the alternative nucleic acid listed.

TABLE 101
Nucleic acid SNPs

| | SNP position(s) on nucleotide |
|---|---|
| Polymorphism | sequence |
| G -> | 42 |
| A -> G | 4404 |

[1432] Variant protein HUMPAX8A_P37 (SEQ ID NO: 185) according to the present invention has an amino acid sequence as given in the “Sequence Listing” of the application; it is encoded by transcript(s) HUMPAX8A_T24 (SEQ ID NO: 156). An alignment is given to the known protein (Paired box protein Pax-8 (SEQ ID NO: 172) SEQ ID NOs:172-182) in the alignment table, on the attached CDROM. One or more alignments to one or more previously published protein sequences are given in the alignment table, on the attached CDROM. A brief description of the relationship of the variant protein according to the present invention to each such aligned protein is as follows:

1. Comparison Report Between HUMPAX8A_P37 (SEQ ID NO: 185) and PAX8_HUMAN (SEQ ID NO:422) (or Q06710-5 (SEQ ID NO: 178), NP_{—}054698 (SEQ ID NO: 181), NP_{—}039247 (SEQ ID NO: 180), Q06710-4 (SEQ ID NO: 176), NP_{—}039245 (SEQ ID NO: 179), Q06710-2 (SEQ ID NO: 175), Q4ZG35_HUMAN (SEQ ID NO: 177), NP_{—}003457 (SEQ ID NO: 182) or NP_{—}039246 (SEQ ID NO: 173)):

[1433] A. An isolated chimeric polypeptide encoding for HUMPAX8A_P37 (SEQ ID NO: 185), comprising a first amino acid sequence being at least about 90% homologous to MPHNSIRSGHGGLNQLGGAFVNGRPLPEVVRQRIVDLAHQGVRPCDISRQLRVSHGCVSKILG corresponding to amino acids 1-63 of PAX8_HUMAN (SEQ ID NO:422), which also corresponds to amino acids 1-63 of HUMPAX8A_P37 (SEQ ID NO: 185), a bridging amino acid S corresponding to amino acids 64 4 of HUMPAX8A_P37 (SEQ ID NO: 185), a second amino acid sequence being at least 90% homologous to RYYETGSIRPGVIGGSKPKVATPKVVEKIGDYKRQNPTMFAWEIRDRLLAEGVCDNDTVPSVSSINRIIRTK VQQPFNLPMDSCVATKSLSPGHTLIPSSAVTPPESPQSDSLGSTYSINGLLGIAQPGSDKRKMDDSDQDSCR LSIDSQSSSSGPRKHLRTDAFSQHHLEPLECPFERQHYPEAYASPSHTKGEQ corresponding to amino acids 64 5-259 of PAX8_HUMAN (SEQ ID NO:422), which also corresponds to amino acids 65-260 of HUMPAX8A_P37 (SEQ ID NO: 185), and a third amino acid sequence being at least about 70%, optionally at least 80%, preferably at least 85%, more preferably at least 90% and most preferably at least 95% homologous to a polypeptide having the sequence VRSWALGGEQGGQGPEKVYSPNEPVLHQSSWKLHQWAQGTCLMQLQA (SEQ ID NO: 507) corresponding to amino acids 261-307 of HUMPAX8A_P37 (SEQ ID NO: 185), wherein said first amino acid sequence, bridging amino acid, second amino acid sequence, and third amino acid sequence are contiguous and in a sequential order.

[1434] The localization of the variant protein was determined according to results from a number of different software programs and analyses, including analyses from SignalP and other specialized programs. The variant protein is believed to be located intracellularly with regard to the cell.

[1435] Variant protein HUMPAX8A_P37 (SEQ ID NO: 185) is encoded by the following transcript(s): HUMPAX8A_T24 (SEQ ID NO: 156), for which the coding portion starts at position 168 and ends at position 1088. The transcript also has the following SNPs as listed in Table 102 (given according to their position on the nucleotide sequence, with the alternative nucleic acid listed).

TABLE 102
Nucleic acid SNPs

| | SNP position(s) on nucleotide |
|---|---|
| Polymorphism | sequence |
| G -> | 42 |
| A -> G | 4407 |

[1436] Variant protein HUMPAX8A_P40 (SEQ ID NO: 186) according to the present invention has an amino acid sequence as given in the “Sequence Listing” of the application; it is encoded by transcript(s) HUMPAX8A_T30 (SEQ ID NO: 158).

[1437] The localization of the variant protein was determined according to results from a number of different software programs and analyses, including analyses from SignalP and other specialized programs. The variant protein is believed to be located intracellularly with regard to the cell.

[1438] Variant protein HUMPAX8A_P40 (SEQ ID NO: 186) is encoded by the following transcript(s): HUMPAX8A_T30 (SEQ ID NO: 158), for which the coding portion starts at position 168 and ends at position 359. The transcript also has the following SNPs as listed in Table 103 (given according to their position on the nucleotide sequence, with the alternative nucleic acid listed).

TABLE 103
Nucleic acid SNPs

| | SNP position(s) on nucleotide |
|---|---|
| Polymorphism | sequence |
| G -> | 42 |
| T -> C | 452 |
| G -> A | 2244 |

[1439] As noted above, cluster HUMPAX8A features 13 segment(s), which were listed in Table 95 above and for which the sequence(s) are given in the “Sequence Listing” of the application. These segment(s) are portions of nucleic acid sequence(s) which are described herein separately because they are of particular interest. A description of some of these segments according to the present invention is now provided.

[1440] Segment cluster HUMPAX8A_N17 (SEQ ID NO: 163) according to the present invention is supported by 3 libraries. The number of libraries was determined as previously described. This segment can be found in the following transcript(s): HUMPAX8A_T26 (SEQ ID NO: 157). Table 104 below describes the starting and ending position of this segment on each transcript.

TABLE 104
Segment location on transcripts

| | | Segment |
|---|---|---|
| | Segment | ending |
| Transcript name | starting position | position |
| HUMPAX8A_T26 (SEQ ID NO: 157) | 769 | 1049 |

[1441] Segment cluster HUMPAX8A_N19 (SEQ ID NO: 165) according to the present invention is supported by 35 libraries. The number of libraries was determined as previously described. This segment can be found in the following transcript(s): HUMPAX8A_T21 (SEQ ID NO: 421), HUMPAX8A_T24 (SEQ ID NO: 156) and HUMPAX8A_T26 (SEQ ID NO: 157). Table 105 below describes the starting and ending position of this segment on each transcript.

TABLE 105
Segment location on transcripts

| | | Segment |
|---|---|---|
| | Segment | ending |
| Transcript name | starting position | position |
| HUMPAX8A_T21 (SEQ ID NO: 421) | 945 | 2053 |
| HUMPAX8A_T24 (SEQ ID NO: 156) | 948 | 2056 |
| HUMPAX8A_T26 (SEQ ID NO: 157) | 1226 | 2334 |

[1442] Segment cluster HUMPAX8A_N21 (SEQ ID NO: 166) according to the present invention is supported by 46 libraries. The number of libraries was determined as previously described. This segment can be found in the following transcript(s): HUMPAX8A_T21 (SEQ ID NO: 421), HUMPAX8A_T24 (SEQ ID NO: 156) and HUMPAX8A_T26 (SEQ ID NO: 157). Table 106 below describes the starting and ending position of this segment on each transcript.

TABLE 106
Segment location on transcripts

| | | Segment |
|---|---|---|
| | Segment | ending |
| Transcript name | starting position | position |
| HUMPAX8A_T21 (SEQ ID NO: 421) | 2100 | 4961 |
| HUMPAX8A_T24 (SEQ ID NO: 156) | 2103 | 4964 |
| HUMPAX8A_T26 (SEQ ID NO: 157) | 2381 | 5242 |

[1443] According to an optional embodiment of the present invention, short segments related to the above cluster are also provided. These segments are up to about 120 bp in length, and so are included in a separate description.

[1444] Segment cluster HUMPAX8A_N8 (SEQ ID NO: 169) according to the present invention is supported by 6 libraries. The number of libraries was determined as previously described. This segment can be found in the following transcript(s): HUMPAX8A_T24 (SEQ ID NO: 156). Table 107 below describes the starting and ending position of this segment on each transcript.

TABLE 107
Segment location on transcripts

| | | Segment |
|---|---|---|
| | Segment | ending |
| Transcript name | starting position | position |
| HUMPAX8A_T24 (SEQ ID NO: 156) | 359 | 361 |

[1445] Segment cluster HUMPAX8A_N20 (SEQ ID NO: 171) according to the present invention is support by 12 libraries. The number of libraries was determined as previously described. This segment can be found in the following transcript(s): HUMPAX8A_T24 (SEQ ID NO: 156) and HUMPAX8A_T26 (SEQ ID NO: 157). Table 108 below describes the starting and ending position of this segment on each transcript.

TABLE 108
Segment location on transcripts

| | | Segment |
|---|---|---|
| | Segment | ending |
| Transcript name | starting position | position |
| HUMPAX8A_T24 (SEQ ID NO: 156) | 2057 | 2102 |
| HUMPAX8A_T26 (SEQ ID NO: 157) | 2335 | 2380 |

[1446] Expression of Homo sapiens paired box gene 8 (PAX8) transcripts detectable by or according to seg23-HUMPAX8A seg23 (SEQ ID NO: 397) amplicon and primers HUMAX8A seg23F (SEQ ID NO: 395) and HUMPAX8A seg23R (SEQ ID NO: 396) was measured by real time PCR. The corresponding sequences of the primers and the amplicons are given below:

Forward primer HUMPAX8A seg23F (SEQ ID NO: 395):
CTGCAGCTCTGGCAGAACC
Reverse primer HUMPAX8A seg23R (SEQ ID NO: 396):
CCCACCCTGAAGACACTCCTC
Amplicon HUMPAX8A seg23 (SEQ ID NO: 397):
CTGCAGCTCTGGCAGAACCACTAAGCTCTCAGCTCCTAGTCATCACATCT
TTTTCCGTTAACCCTGCCAAGTCAACCAGATGAGGAGTGTCTTCAGGGTG
GG

[1447] The below table 109 gives a conversion between the terms for segments (nodes) in the experimental results and those listed earlier in the description for cluster HUMPAX8A:

TABLE 109

| Segment name for HUMPAX8A | Segment name within the description |
|---|---|
| in experimental results | for cluster HUMPAX8A report |
| seg 23 (SEQ ID NO: 397) | seg 19 |

Expression of Homo sapiens Paired Box Gene 8 (PAX8)HUMPAX8A Transcripts which are Detectable by Amplicon as Depicted in Sequence Name HUMPAX8A seg23 (SEQ ID NO: 397) in Normal and Cancerous Ovary Tissues

[1448] Expression of Homo sapiens paired box gene 8 (PAX8) transcripts detectable by or according to seg23-HUMPAX8A seg23 (SEQ ID NO: 397) amplicon and primers HUMPAX8A seg23F (SEQ ID NO: 395) and HUMPAX8A seg23R (SEQ ID NO: 396) was measured by real time PCR. In parallel the expression of four housekeeping genes—PBGD (GenBank Accession No. BC019323 (SEQ ID NO:336); amplicon—PBGD-amplicon (SEQ ID NO: 302)), HPRT1 (GenBank Accession No. NM_{—}000194 (SEQ ID NO:337); amplicon—HPRT1-amplicon (SEQ ID NO: 305) (SEQ ID NO: 305)), SDHA (GenBank Accession No. NM_{—}004168 (SEQ ID NO:335); amplicon—SDHA-amplicon (SEQ ID NO:299)), and GAPDH (GenBank Accession No. BC026907 (SEQ ID NO:338) (GAPDH amplicon (SEQ ID NO: 308)) was measured similarly. For each RT sample, the expression of the above amplicon was normalized to the geometric mean of the quantities of the housekeeping genes. The normalized quantity of each RT sample was then divided by the median of the quantities of the normal post-mortem (PM) samples (Sample Nos. 45, 46, 48, 71, Table 1_{—}1, above: “Tissue samples in ovarian cancer testing panel”), to obtain a value of fold up-regulation for each sample relative to the median of the normal PM samples.

[1449] FIG. 56A is a histogram showing over expression of the Homo sapiens paired box gene 8 (PAX8) transcripts in cancerous ovary samples relative to the normal samples.

[1450] As is evident from FIG. 56A, the expression of Homo sapiens paired box gene 8 (PAX8) transcripts detectable by the above amplicon in cancer samples was significantly higher than in the non-cancerous samples (Sample Nos. 45, 46, 48, 71, Table 1_{—}1, “Tissue samples in ovarian cancer testing panel”). Notably an over-expression of at least 5 fold was found in 21 out of 41 adenocarcinoma samples.

[1451] Statistical analysis was applied to verify the significance of these results, as described below.

[1452] The P value for the difference in the expression levels of Homo sapiens paired box gene 8 (PAX8) transcripts detectable by the above amplicon in ovary cancer samples versus the normal tissue samples was determined by T test as 5.78E-03.

[1453] Primer pairs are also optionally and preferably encompassed within the present invention; for example, for the above experiment, the following primer pair was used as a non-limiting illustrative example only of a suitable primer pair: HUMPAX8A seg23F (SEQ ID NO: 395) forward primer; and HUMPAX8A seg23R (SEQ ID NO: 396) reverse primer.

[1454] The present invention also preferably encompasses any amplicon obtained through the use of any suitable primer pair; for example, for the above experiment, the following amplicon was obtained as a non-limiting illustrative example only of a suitable amplicon: HUMPAX8A seg23 (SEQ ID NO: 397).

[1455] Expression of Homo sapiens paired box gene 8 (PAX8) HUMPAX8A transcripts detectable by or according to seg23—HUMPAX8A_seg23 (SEQ ID NO: 251) amplicon and primers HUMPAX8A_seg23F (SEQ ID NO: 249) and HUMPAX8A seg23R (SEQ ID NO: 250) was further measured by real time PCR using enlarged panel as shown in Table 1_{—}5. In parallel the expression of three housekeeping genes—SDHA (GenBank Accession No. NM_{—}004168 (SEQ ID NO:335); amplicon—SDHA-amplicon (SEQ ID NO:299)), HPRT1 (GenBank Accession No. NM_{—}000194 (SEQ ID NO:337); amplicon—HPRT1-amplicon (SEQ ID NO: 305) (SEQ ID NO: 305)) and G6PD (GenBank Accession No. NM_{—}000402 (SEQ ID NO:339); G6PD amplicon (SEQ ID NO: 311)) was measured similarly. For each RT sample, the expression of the above amplicon was normalized to the normalization factor calculated from the expression of these house keeping genes as described in normalization method 2 in the “materials and methods” section. The normalized quantity of each RT sample was then divided by the median of the quantities of the normal samples (sample numbers 52, 53, 54, 55, 56, 57, 58, 59, 60, 61, 62, 63, 64, 65, 66, 67, 68, 69, 70, 71, 72, 73, 74, 75, 76, 77 and 78, Table 1_{—}5 above), to obtain a value of fold up-regulation for each sample relative to the median of the normal samples.

[1456] FIG. 56B is a histogram showing over expression of the above-indicated Homo sapiens paired box gene 8 (PAX8) HUMPAX8A transcripts in cancerous Ovary samples relative to the normal samples.

[1457] As is evident from FIG. 56B, the expression of Homo sapiens paired box gene 8 (PAX8) HUMPAX8A transcripts detectable by the above amplicon in adenocarcinoma samples was significantly higher than in the non-cancerous samples (sample numbers 52, 53, 54, 55, 56, 57, 58, 59, 60, 61, 62, 63, 64, 65, 66, 67, 68, 69, 70, 71, 72, 73, 74, 75, 76, 77 and 78, Table 1_{—}5 above). Over expression was most significant in serous samples from patient with age above 51. Notably an over-expression of at least 8 fold was found in 47 out of 74 adenocarcinoma samples, specifically in 26 out of 38 serous carcinoma samples, in 21 out of 25 serous samples from patients with age above 51, in 5 out of 10 endometroid samples, and in 7 out of 12 mucinous carcinoma samples and.

[1458] Statistical analysis was applied to verify the significance of these results, as described below.

[1459] The P value for the difference in the expression levels of Homo sapiens paired box gene 8 (PAX8) HUMPAX8A transcripts detectable by the above amplicon in Ovary adenocarcinoma samples versus the normal tissue samples was determined by T test as 4.68e-08. The P value for the difference in the expression levels of Homo sapiens paired box gene 8 (PAX8) HUMPAX8A transcripts detectable by the above amplicon in Ovary serous carcinoma samples versus the normal tissue samples was determined by T test as 1.63e-08. The P value for the difference in the expression levels of Homo sapiens paired box gene 8 (PAX8) HUMPAX8A transcripts detectable by the above amplicon in Ovary mucinous carcinoma samples versus the normal tissue samples was determined by T test as 9.69e-003. The P value for the difference in the expression levels of Homo sapiens paired box gene 8 (PAX8) HUMPAX8A transcripts detectable by the above amplicon in Ovary endometroid samples versus the normal tissue samples was determined by T test as 9.29e-008.

[1460] Threshold of 8 fold over expression was found to differentiate between adenocarcinoma and normal samples with P value 1.82e-08 as checked by exact Fisher test. Threshold of 8 fold over expression was found to differentiate between serous carcinoma and normal samples with P value of 5.13e-08 as checked by exact Fisher test. Threshold of 8 fold over expression was found to differentiate between mucinous carcinoma and normal samples with P value of 3.54e-004 as checked by exact Fisher test. Threshold of 8 fold over expression was found to differentiate between endometroid and normal samples with P value of 1.82e-008 as checked by exact Fisher test.

[1461] The above values demonstrate statistical significance of the results.

[1462] Primer pairs are also optionally and preferably encompassed within the present invention; for example, for the above experiment, the following primer pair was used as a non-limiting illustrative example only of a suitable primer pair: HUMPAX8A_seg23F (SEQ ID NO: 249) forward primer; and HUMPAX8A_seg23R (SEQ ID NO: 250) reverse primer.

[1463] The present invention also preferably encompasses any amplicon obtained through the use of any suitable primer pair; for example, for the above experiment, the following amplicon was obtained as a non-limiting illustrative example only of a suitable amplicon: HUMPAX8A_seg23 (SEQ ID NO: 251).

Expression of Homo sapiens Paired Box Gene 8 (PAX8) HUMPAX8A HUMPAX8A Transcripts which are Detectable by Amplicon as Depicted in Sequence Name HUMAX8A_seg23 (SEQ ID NO: 251) in Different Normal Tissues

[1464] Expression of Homo sapiens paired box gene 8 (PAX8) HUMPAX8A transcripts detectable by or according to seg23_HUMPAX8A_seg23 (SEQ ID NO: 251) amplicon and primers HUMPAX8A_seg23F (SEQ ID NO: 249) and HUMPAX8A seg23R (SEQ ID NO: 250) was measured by real time PCR. In parallel the expression of four housekeeping genes—SDHA (GenBank Accession No. NM_{—}004168 (SEQ ID NO:335); amplicon—SDHA-amplicon (SEQ ID NO:299)), Ubiquitin (GenBank Accession No. BC000449 (SEQ ID NO:341); amplicon—Ubiquitin-amplicon (SEQ ID NO: 317)), RPL19 (GenBank Accession No. NM_{—}000981 (SEQ ID NO:342); RPL19 amplicon (SEQ ID NO: 320)) and TATA box (GenBank Accession No. NM_{—}003194 (SEQ ID NO:343); TATA amplicon (SEQ ID NO: 323)) was measured similarly. For each RT sample, the expression of the above amplicon was normalized to the normalization factor calculated from the expression of these house keeping genes as described in normalization method 2 in the “materials and methods” section. The normalized quantity of each RT sample was then divided by the median of the quantities of the ovary samples (sample numbers 31, 32, 33 and 34, Table 1_{—}10 above), to obtain a value of relative expression of each sample relative to the median of the ovary samples. FIG. 57 shows expression of Homo sapiens paired box gene 8 (PAX8) HUMPAX8A HUMPAX8A transcripts which are detectable by amplicon as depicted in sequence name HUMPAX8A_seg23 (SEQ ID NO: 251) in different normal tissues.

[1465] Expression of Homo sapiens Paired Box Gene 8 (PAX8) HUMPAX8A HUMPAX8A Transcripts which are Detectable by Amplicon as Depicted in Sequence Name HUMPAX8A seg23 (SEQ ID NO: 251) in Normal and Cancerous Breast Tissues

[1466] Expression of Homo sapiens paired box gene 8 (PAX8) HUMPAX8A HUMPAX8A transcripts detectable by or according to seg23, HUMPAX8A_seg23 (SEQ ID NO: 251) amplicon and primers HUMPAX8A_seg23F (SEQ ID NO: 249) HUMPAX8A_seg23R (SEQ ID NO: 250) was measured by real time PCR. In parallel the expression of four housekeeping genes—PBGD (GenBank Accession No. BC019323 (SEQ ID NO:336); amplicon —PBGD-amplicon (SEQ ID NO: 302)), RPL19 (GenBank Accession No. NM_{—}000981 (SEQ ID NO:342); RPL19 amplicon (SEQ ID NO: 320), SDHA (GenBank Accession No. NM_{—}004168 (SEQ ID NO:335); amplicon—SDHA-amplicon (SEQ ID NO:299)) and G6PD (GenBank Accession No. NM_{—}000402 (SEQ ID NO:339); G6PD amplicon (SEQ ID NO: 311)) was measured similarly. For each RT sample, the expression of the above amplicon was normalized to normalization factor calculated from the expression of these house keeping genes as described in normalization method 2 in the “materials and methods” section. The normalized quantity of each RT sample was then divided by the median of the quantities of the normal samples (Sample Nos. 43, 45, 46, 47, 48, 49, 50, 51, 52, 54, 56, 58, 59, 60, 61, 62, 63, 64, 65, 66, 67, 68 and 69, Table 1_{—}7, above), to obtain a value of fold differential expression for each sample relative to the median of the normal samples.

[1467] In one experiment that was carried out no differential expression in the cancerous samples relative to the normal samples was observed.

[1468] Primer pairs are also optionally and preferably encompassed within the present invention; for example, for the above experiment, the following primer pair was used as a non-limiting illustrative example only of a suitable primer pair: HUMPAX8A_seg23F (SEQ ID NO: 249) forward primer; and HUMPAX8A_seg23R (SEQ ID NO: 250) reverse primer.

[1469] The present invention also preferably encompasses any amplicon obtained through the use of any suitable primer pair; for example, for the above experiment, the following amplicon was obtained as a non-limiting illustrative example only of a suitable amplicon: HUMPAX8A_seg23 (SEQ ID NO: 251).

Expression of Homo sapiens Paired Box Gene 8 (PAX8) HUMPAX8A HUMPAX8A Transcripts which are Detectable by Amplicon as Depicted in Sequence Name HUMPAX8A_seg23 (SEQ ID NO: 251) in Normal and Cancerous Colon Tissues

[1470] Expression of Homo sapiens paired box gene 8 (PAX8) HUMPAX8A HUMPAX8A transcripts detectable by or according to seg23, HUMPAX8A_seg23 (SEQ ID NO: 251) amplicon and primers HUMPAX8A_seg23F (SEQ ID NO: 249) HUMPAX8A_seg23R (SEQ ID NO: 250) was measured by real time PCR. In parallel the expression of three housekeeping genes—PBGD (GenBank Accession No. BC019323 (SEQ ID NO:336); amplicon—PBGD-amplicon (SEQ ID NO: 302)), HPRT1 (GenBank Accession No. NM 000194 (SEQ ID NO:337); amplicon—HPRT1-amplicon (SEQ ID NO: 305) (SEQ ID NO: 305)) and G6PD (GenBank Accession No. NM_{—}000402 (SEQ ID NO:339); G6PD amplicon (SEQ ID NO: 311)) was measured similarly. For each RT sample, the expression of the above amplicon was normalized to normalization factor calculated from the expression of these house keeping genes as described in normalization method 2 in the “materials and methods” section. The normalized quantity of each RT sample was then divided by the median of the quantities of the normal samples (Sample Nos. 52, 42, 43, 44, 45, 46, 47, 48, 49, 50, 51, 53, 54, 55, 56, 57, 58, 59, 60, 61, 62, 63 and 64, Table 1_{—}8, above), to obtain a value of fold differential expression for each sample relative to the median of the normal samples.

[1471] In one experiment that was carried out no differential expression in the cancerous samples relative to the normal samples was observed.

[1472] Primer pairs are also optionally and preferably encompassed within the present invention; for example, for the above experiment, the following primer pair was used as a non-limiting illustrative example only of a suitable primer pair: HUMPAX8A_seg23F (SEQ ID NO: 249) forward primer; and HUMPAX8A_seg23R (SEQ ID NO: 250) reverse primer.

[1473] The present invention also preferably encompasses any amplicon obtained through the use of any suitable primer pair; for example, for the above experiment, the following amplicon was obtained as a non-limiting illustrative example only of a suitable amplicon: HUMAX8A_seg23 (SEQ ID NO: 251).

Expression of Homo sapiens Paired Box Gene 8 (PAX8) HUMPAX8A HUMPAX8A Transcripts which are Detectable by Amplicon as Depicted in Sequence Name HUMPAX8A_seg23 (SEQ ID NO: 251) in Normal and Cancerous Lung Tissues

[1474] Expression of Homo sapiens paired box gene 8 (PAX8) HUMPAX8A HUMPAX8A transcripts detectable by or according to seg23, HUMPAX8A_seg23 (SEQ ID NO: 251) amplicon and primers HUMPAX8A seg23F (SEQ ID NO: 249) HUMPAX8A_seg23R (SEQ ID NO: 250) was measured by real time PCR. In parallel the expression of four housekeeping genes—PBGD (GenBank Accession No. BC019323 (SEQ ID NO:336); amplicon—PBGD-amplicon (SEQ ID NO: 302)), SDHA (GenBank Accession No. NM_{—}004168 (SEQ ID NO:335); amplicon —SDHA-amplicon (SEQ ID NO:299)), Ubiquitin (GenBank Accession No. BC000449 (SEQ ID NO:341); amplicon—Ubiquitin-amplicon (SEQ ID NO: 317)) and HPRT1 (GenBank Accession No. NM_{—}000194 (SEQ ID NO:337); amplicon—HPRT1-amplicon (SEQ ID NO: 305) (SEQ ID NO: 305)) was measured similarly. For each RT sample, the expression of the above amplicon was normalized to normalization factor calculated from the expression of these house keeping genes as described in normalization method 2 in the “materials and methods” section. The normalized quantity of each RT sample was then divided by the median of the quantities of the normal samples (Sample Nos. 51, 52, 53, 54, 55, 56, 57, 58, 59, 60, 61, 62, 63, 64, 69 and 70, Table 1_{—}6, above), to obtain a value of fold differential expression for each sample relative to the median of the normal samples.

[1475] In one experiment that was carried out no differential expression in the cancerous samples relative to the normal samples was observed.

[1476] Primer pairs are also optionally and preferably encompassed within the present invention; for example, for the above experiment, the following primer pair was used as a non-limiting illustrative example only of a suitable primer pair: HUMPAX8A_seg23F (SEQ ID NO: 249) forward primer; and HUMPAX8A_seg23R (SEQ ID NO: 250) reverse primer.

[1477] The present invention also preferably encompasses any amplicon obtained through the use of any suitable primer pair; for example, for the above experiment, the following amplicon was obtained as a non-limiting illustrative example only of a suitable amplicon: HUMPAX8A_seg23 (SEQ ID NO: 251).

### Description for Cluster N31842

[1478] Cluster N31842 (internal ID 2878310) features 3 transcript(s) and 4 segment(s) of interest, the names for which are given in Tables 110 and 111, respectively, the sequences themselves are given in the Sequence Listing. The selected protein variants are given in table 112.

TABLE 110
Transcripts of interest
Transcript Name

N31842_T4 (SEQ ID NO: 478)
N31842_T5 (SEQ ID NO: 479)
N31842_T6 (SEQ ID NO: 480)

TABLE 111
Segments of interest

Segment Name
N31842_N9 (SEQ ID NO: 481)
N31842_N11 (SEQ ID NO: 482)
N31842_N6 (SEQ ID NO: 483)
N31842_N8 (SEQ ID NO: 484)

TABLE 112
Proteins of interest

| Protein Name | Corresponding Transcript(s) |
|---|---|
| N31842_P3 (SEQ ID NO: 488) | N31842_T4 (SEQ ID NO: 478) |
| N31842_P4 (SEQ ID NO: 489) | N31842_T5 (SEQ ID NO: 479) |
| N31842_P5 (SEQ ID NO: 490) | N31842_T6 (SEQ ID NO: 480) |

[1479] These sequences are variants of the known protein Homeobox protein Hox-C10 (SEQ ID NO:485) (SwissProt accession identifier HXCA_HUMAN), referred to herein as the previously known protein.

[1480] Protein Homeobox protein Hox-C10 (SEQ ID NO:485) is known or believed to have the following function(s): Sequence-specific transcription factor which is part of a developmental regulatory system that provides cells with specific positional identities on the anterior-posterior axis. The sequence for protein Homeobox protein Hox-C10 (SEQ ID NO:485) is given. Known polymorphisms for this sequence are as shown in Table 113.

TABLE 113
Amino acid mutations for Known Protein

| SNP position(s) on amino | |
|---|---|
| acid sequence | Comment |
| 265 | A -> G |
| 271 | Missing |
| 118 | K -> N |

[1481] Protein Homeobox protein Hox-C10 (SEQ ID NO:485) localization is believed to be Nuclear.

[1482] The following GO Annotation(s) apply to the previously known protein. The following annotation(s) were found: positive regulation of cell proliferation, which are annotation(s) related to Biological Process; and RNA polymerase II transcription factor activity, which are annotation(s) related to Molecular Function.

[1483] PCT/IB2005/004037 and US Patent Application No. US 2006-0046257, filed on Jan. 27, 2005 and assigned to the applicant of the present invention, disclose the sequences of N31842_T4 (SEQ ID NO:478), N31842_T5 (SEQ ID NO:479), N31842_T6 (SEQ ID NO:480), N31842_P4 (SEQ ID NO:489) and N31842_P5 (SEQ ID NO:490) of N31842 contig, and assays and methods of use thereof in the diagnosis of lung cancer.

[1484] Unexpectedly, the sequences of N31842_T4 (SEQ ID NO:478), N31842_T5 (SEQ ID NO:479), N31842_T6 (SEQ ID NO:480), N31842_P4 (SEQ ID NO:489) and N31842_P5 (SEQ ID NO:490) of N31842 contig are now disclosed to be differentially expressed in breast cancer, ovarian cancer and renal disorders, and therefore may be contemplated within the scope of the present invention as diagnostic markers for these diseases.

[1485] Surprisingly, an N31842 variant, designated N31842_P3 (SEQ ID NO:488), is now disclosed to be differentially expressed in breast cancer, ovarian cancer, renal cancer and lung disorders, and therefore may be contemplated within the scope of the present invention as diagnostic markers for these diseases.

[1486] Surprisingly, N31842 variant polynucleotides and their respective encoded polypeptides demonstrate an age related differential diagnostic capability. Therefore, the present invention further provides diagnostic methods, kits and assays for diagnosis, assessment and prognostic indications regarding to breast cancer, according to the age of the subject, as described herein.

[1487] Cluster N31842 can be used as a diagnostic marker according to overexpression of transcripts of this cluster in cancer. Expression of such transcripts in normal tissues is also given according to the previously described methods. The term “number” in the left hand column of the table and the numbers on the y-axis of the FIG. 58 refer to weighted expression of ESTs in each category, as “parts per million” (ratio of the expression of ESTs for a particular cluster to the expression of all ESTs in that category, according to parts per million).

[1488] Overall, the following results were obtained as shown with regard to the histograms in FIG. 58 and Table 114. This cluster is overexpressed (at least at a minimum level) in the following pathological conditions: a mixture of malignant tumors from different tissues and epithelial malignant tumors.

TABLE 114
Normal tissue distribution

| Name of Tissue | Number |
|---|---|
| lung | 10 |
| pancreas | 0 |
| liver | 0 |
| prostate | 0 |
| general | 6 |
| skin | 34 |
| uterus | 0 |
| colon | 0 |
| kidney | 41 |
| breast | 43 |
| stomach | 0 |
| epithelial | 11 |
| bone | 37 |

TABLE 115
P values and ratios for expression in cancerous tissue

| Name of Tissue | P1 | P2 | SP1 | R3 | SP2 | R4 |
|---|---|---|---|---|---|---|
| lung | 7.2e−01 | 3.4e−01 | 1.0e+00 | 0.6 | 6.7e−01 | 1.3 |
| pancreas | N/A | 4.2e−01 | N/A | N/A | 2.1e−02 | 2.8 |
| liver | N/A | 4.7e−01 | N/A | N/A | 4.8e−01 | 1.9 |
| prostate | 7.1e−01 | 7.6e−01 | 6.7e−01 | 1.5 | 7.5e−01 | 1.3 |
| general | 8.3e−03 | 1.1e−06 | 2.3e−02 | 2.3 | 1.8e−10 | 4.3 |
| skin | 6.7e−01 | 4.8e−01 | 1.0e−01 | 3.5 | 3.2e−01 | 1.0 |
| uterus | 6.9e−02 | 3.5e−02 | 1.9e−01 | 3.0 | 5.4e−02 | 3.1 |
| colon | 3.5e−01 | 2.6e−01 | N/A | N/A | 5.9e−01 | 1.7 |
| kidney | 4.9e−01 | 5.2e−01 | 6.1e−01 | 1.0 | 5.2e−01 | 1.0 |
| breast | 8.2e−01 | 5.3e−01 | 7.7e−01 | 1.0 | 8.5e−01 | 0.8 |
| stomach | N/A | 4.2e−01 | N/A | N/A | 6.5e−02 | 2.0 |
| epithelial | 9.1e−02 | 2.4e−03 | 1.9e−01 | 1.5 | 2.1e−04 | 2.7 |
| bone | 3.7e−01 | 4.3e−01 | 6.4e−01 | 1.4 | 4.1e−01 | 1.4 |

[1489] As noted above, cluster N31842 features 3 transcript(s), which were listed in Table 110 above. These transcript(s) encode for protein(s) which are variant(s) of protein Homeobox protein Hox-C10 (SEQ ID NO:485). A description of each variant protein according to the present invention is now provided.

[1490] Variant protein N31842_P3 (SEQ ID NO:488) according to the present invention has an amino acid sequence encoded by transcript(s) N31842_T4 (SEQ ID NO:478).

[1491] The localization of the variant protein was determined according to results from a number of different software programs and analyses, including analyses from SignalP and other specialized programs. The variant protein is believed to be secreted.

[1492] Variant protein N31842_P3 (SEQ ID NO:488) also has the following non-silent SNPs (Single Nucleotide Polymorphisms) as listed in Table 116, (given according to their position(s) on the amino acid sequence, with the alternative amino acid(s) listed).

TABLE 116
Amino acid mutations

| SNP position(s) on amino acid | |
|---|---|
| sequence | Alternative amino acid(s) |
| 37 | L -> W |

[1493] Variant protein N31842_P3 (SEQ ID NO:488) is encoded by the following transcript(s): N31842_T4 (SEQ ID NO:478), for which coding portion starts at position 1 and ends at position 456. The transcript also has the following SNPs as listed in Table 117 (given according to their position on the nucleotide sequence, with the alternative nucleic acid listed; N31842_P3 (SEQ ID NO:488)).

TABLE 117
Nucleic acid SNPs

| Polymorphism | SNP position(s) on nucleotide sequence |
|---|---|
| T -> G | 110 |
| A -> G | 537, 928 |
| C -> | 667 |
| C -> T | 1171, 1277 |
| -> T | 1459 |

[1494] Variant protein N31842_P4 (SEQ ID NO:489) according to the present invention has an amino acid sequence encoded by transcript(s) N31842_T5 (SEQ ID NO:479). An alignment is given to the known protein (Homeobox protein Hox-C10 SEQ ID NOs:485-487) in the alignment table on the attached CDROM. A brief description of the relationship of the variant protein according to the present invention to each such aligned protein is as follows:

### Comparison Report Between N31842_P4 (SEQ ID NO:489) and Known Protein(s) HXCA_HUMAN (SEQ ID NO:423) and NP_{—}059105 (SEQ ID NO: 486):

[1495] A. An isolated chimeric polypeptide encoding for N31842_P4 (SEQ ID NO:489), comprising a amino acid sequence being at least about 90% homologous to MYLTRERRLEISKTINLTDRQVKIWFQNRRMKLKKMNRENRIRELTSNFNFT corresponding to amino acids 291-342 of known protein(s) HXCA_HUMAN (SEQ ID NO:423) and NP_{—}059105 (SEQ ID NO: 486), which also corresponds to amino acids 1-52 of N31842_P4 (SEQ ID NO:489), wherein said and first amino acid sequence are contiguous and in a sequential order.

[1496] The localization of the variant protein was determined according to results from a number of different software programs and analyses, including analyses from SignalP and other specialized programs. The variant protein is believed to be located intracellularly with regard to the cell.

[1497] Variant protein N31842_P4 (SEQ ID NO:489) also has the following non-silent SNPs (Single Nucleotide Polymorphisms) as listed in Table 118, (given according to their position(s) on the amino acid sequence, with the alternative amino acid(s) listed).

TABLE 118
Amino acid mutations

| SNP position(s) on amino acid | |
|---|---|
| sequence | Alternative amino acid(s) |
| 13 | K -> R |

[1498] Variant protein N31842_P4 (SEQ ID NO:489) is encoded by the following transcript(s): N31842_T5 (SEQ ID NO:479), for which the coding portion starts at position 182 and ends at position 337. The transcript also has the following SNPs as listed in Table 119 (given according to their position on the nucleotide sequence, with the alternative nucleic acid listed).

TABLE 119
Nucleic acid SNPs

| Polymorphism | SNP position(s) on nucleotide sequence |
|---|---|
| A -> G | 219, 610 |
| C -> | 349 |
| C -> T | 853, 959 |
| -> T | 1141 |

[1499] Variant protein N31842_P5 (SEQ ID NO:490) according to the present invention has an amino acid sequence encoded by transcript N31842_T6 (SEQ ID NO:480). One or more alignments to one or more previously published protein sequences are given in the alignment table in the attached CDROM. A brief description of the relationship of the variant protein according to the present invention to each such aligned protein is as follows:

### Comparison Report Between N31842_P5 (SEQ ID NO:490) and Known Protein(s) HXCA_HUMAN (SEQ ID NO:423) and NP_{—}059105 (SEQ ID NO: 486):

[1500] A. An isolated chimeric polypeptide encoding for N31842_P5 (SEQ ID NO:490), comprising a first amino acid sequence being at least about 70%, optionally at least 80%, preferably at least 85%, more preferably at least 90% and most preferably at least 95%, homologous to a polypeptide having the sequence SQARAGCGLLSQCWCPGELTSPSS (SEQ ID NO: 533) corresponding to amino acids 1-24 of N31842_P5 (SEQ ID NO:490), and a second amino acid sequence being at least about 90% homologous to EEIKAENTTGNWLTAKSGRKKRCPYTKHQTLELEKEFLFNMYLTRERRLEISKTINLTDRQVKIWFQNRRM KLKKMNRENRIRELTSNFNFT corresponding to amino acids 251-342 of known protein(s) HXCA_HUMAN (SEQ ID NO:423) and NP_{—}059105 (SEQ ID NO: 486), which also corresponds to amino acids 25-116 of N31842_P5 (SEQ ID NO:490), wherein said first amino acid sequence and second amino acid sequence are contiguous and in a sequential order.

[1501] B. An isolated polypeptide encoding for a head of N31842_P5 (SEQ ID NO:490), comprising a polypeptide being at least 70%, optionally at least about 80%, preferably at least about 85%, more preferably at least about 90% and most preferably at least about 95% homologous to the sequence SQARAGCGLLSQCWCPGELTSPSS (SEQ ID NO: 533) of N31842_P5 (SEQ ID NO:490).

[1502] The localization of the variant protein was determined according to results from a number of different software programs and analyses, including analyses from SignalP and other specialized programs. The variant protein is believed to be located intracellularly with regard to the cell.

[1503] Variant protein N31842_P5 (SEQ ID NO:490) also has the following non-silent SNPs (Single Nucleotide Polymorphisms) as listed in Table 120, (given according to their position(s) on the amino acid sequence, with the alternative amino acid(s) listed).

TABLE 120
Amino acid mutations

| SNP position(s) on amino acid | |
|---|---|
| sequence | Alternative amino acid(s) |
| 77 | K -> R |

[1504] Variant protein N31842_P5 (SEQ ID NO:490) is encoded by the following transcript(s): N31842_T6 (SEQ ID NO:480), for which coding portion starts at position 2 and ends at position 349. The transcript also has the following SNPs as listed in Table 121 (given according to their position on the nucleotide sequence, with the alternative nucleic acid listed).

TABLE 121
Nucleic acid SNPs

| Polymorphism | SNP position(s) on nucleotide sequence |
|---|---|
| A -> G | 231, 622 |
| C -> | 361 |
| C -> T | 865, 971 |
| -> T | 1153 |

[1505] As noted above, cluster N31842 features 4 segment(s), which were listed in Table 111 above and for which the sequence(s) are given. These segment(s) are portions of nucleic acid sequence(s) which are described herein separately because they are of particular interest. A description of some of these segments according to the present invention is now provided.

[1506] Segment cluster N31842_N9 (SEQ ID NO:481) (N31842_N9 segment name in experimental results is N31842 seg 6) according to the present invention is supported by 9 libraries. The number of libraries was determined as previously described. This segment can be found in the following transcript(s): N31842_T4 (SEQ ID NO:478). Table 122 below describes the starting and ending position of this segment on each transcript.

TABLE 122
Segment location on transcripts

| | Segment | Segment |
|---|---|---|
| Transcript name | starting position | ending position |
| N31842_T4 (SEQ ID NO: 478) | 75 | 380 |

[1507] Microarray (chip) data is also available for this segment as follows. As described above with regard to the cluster itself, various oligonucleotides were tested for being differentially expressed in various disease conditions, particularly cancer. The following oligonucleotides were found to hit this segment, shown in Table 123.

TABLE 123
Oligonucleotides related to this segment

| Oligonucleotide name | Overexpressed in cancers | Chip reference |
|---|---|---|
| N31842_0_5_42 | lung malignant tumors | LUN |
| (SEQ ID NO: 493) | | |

[1508] Segment cluster N31842_N11 (SEQ ID NO:482) (N31842_N11 segment name in experimental results is N31842 seg11 (WT)) according to the present invention is supported by 66 libraries. The number of libraries was determined as previously described. This segment can be found in the following transcript(s): N31842_T4 (SEQ ID NO:478), N31842_T5 (SEQ ID NO:479) and N31842_T6 (SEQ ID NO:480). Table 124 below describes the starting and ending position of this segment on each transcript.

TABLE 124
Segment location on transcripts

| | Segment | Segment |
|---|---|---|
| Transcript name | starting position | ending position |
| N31842_T4 (SEQ ID NO: 478) | 381 | 881 |
| N31842_T5 (SEQ ID NO: 479) | 63 | 563 |
| N31842_T6 (SEQ ID NO: 480) | 75 | 575 |

[1509] Microarray (chip) data is also available for this segment as follows. As described above with regard to the cluster itself, various oligonucleotides were tested for being differentially expressed in various disease conditions, particularly cancer. The following oligonucleotides were found to hit this segment, shown in Table 125.

TABLE 125
Oligonucleotides related to this segment

| Oligonucleotide name | Overexpressed in cancers | Chip reference |
|---|---|---|
| N31842_0_13_73 | lung malignant tumors | LUN |
| N31842_0_13_73 | breast malignant tumors | BRS |

[1510] According to an optional embodiment of the present invention, short segments related to the above cluster are also provided. These segments are up to about 120 bp in length, and so are included in a separate description.

[1511] Segment cluster N31842_N6 (SEQ ID NO:483) according to the present invention is supported by 2 libraries. The number of libraries was determined as previously described. This segment can be found in the following transcript(s): N31842_T5 (SEQ ID NO:479). Table 126 below describes the starting and ending position of this segment on each transcript.

TABLE 126
Segment location on transcripts

| | Segment | Segment |
|---|---|---|
| Transcript name | starting position | ending position |
| N31842_T5 (SEQ ID NO: 479) | 1 | 62 |

[1512] Segment cluster N31842_N8 (SEQ ID NO:484) according to the present invention is supported by 1 libraries. The number of libraries was determined as previously described. This segment can be found in the following transcript(s): N31842_T4 (SEQ ID NO:478) and N31842_T6 (SEQ ID NO:480). Table 127 below describes the starting and ending position of this segment on each transcript.

TABLE 127
Segment location on transcripts

| | Segment | Segment |
|---|---|---|
| Transcript name | starting position | ending position |
| N31842_T4 (SEQ ID NO: 478) | 1 | 74 |
| N31842_T6 (SEQ ID NO: 480) | 1 | 74 |

[1513] Expression of Homo sapiens homeo box C10 (HOXC10) transcripts detectable by or according to segments as described below was measured by real time PCR: seg8—N31842 seg8WT (SEQ ID NO: 400) amplicon and primers N31842 seg8WTF (SEQ ID NO: 398) and N31842 seg8WTR (SEQ ID NO: 399); seg6-N31842_seg6 (SEQ ID NO: 403) amplicon and primers N31842_seg6F (SEQ ID NO: 401) and N31842_seg6R (SEQ ID NO: 402).

[1514] The sequences of the corresponding amplicons and primers are given below:

Forward primer N31842 seg8WTF (SEQ ID NO: 398):
AATGCAATGCGACTGCAAAA
Reverse primer N31842 seg8WTR (SEQ ID NO: 399):
CATTTCTCATGCTTTAAGTGGAAGC
Amplicon N31842 seg8WT (SEQ ID NO: 400):
AATGCAATGCGACTGCAAAAAAGGCAAAGACCTCAGACTCTCCTTCCAAG
GGACCTGTGGTTCGTGCTGCGAAGATGCTTCCACTTAAAGCATGAGAAAT
G
Forward primer N31842_seg6F (SEQ ID NO: 401):
GCGAAACGCGATTTGTTGTT
Reverse primer N31842_seg6R (SEQ ID NO: 402):
CATCTGGAGGAGGGAGGGA
Amplicon N31842_seg6 (SEQ ID NO: 403):
GCGAAACGCGATTTGTTGTTTGTGGGTCTGATTTGTGCGTGCGGCTTGGG
CTCCTGCGGCTTTTGGCTCGGCCGGGGGCCTTGGGCAGCGAGGCTGGAGC
CGGAAGAGGTGGAGGTGAAGGGCTGCCCGCCACGTCCCTCCCTCCTCCAG
ATG

[1515] The below table 128 gives a conversion between the terms for segments (nodes) in the experimental results and those listed earlier in the description for cluster N31842:

TABLE 128

| | Segment name within the |
|---|---|
| Segment name for N31842 | description for cluster N31842 |
| in experimental results | report |
| seg 6 (SEQ ID NO: 403) | seg 9 |
| Seg8WT (SEQ ID NO: 400) | Seg11 |

[1516] Expression of Homo sapiens Homeo Box C10 (HOXC10) N31842 Transcripts which are Detectable by Amplicon as Depicted in Sequence Name N31842 seg8WT (SEQ ID NO: 400) in Normal and Cancerous Lung Tissues

[1517] Expression of Homo sapiens homeo box C10 (HOXC10) transcripts detectable by or according to seg8-N31842 seg8WT (SEQ ID NO: 400) amplicon and primers N31842 seg8WTF (SEQ ID NO: 398) and N31842 seg8WTR (SEQ ID NO: 399) was measured by real time PCR. In parallel the expression of four housekeeping genes—PBGD (GenBank Accession No. BC019323 (SEQ ID NO:336); amplicon—PBGD-amplicon (SEQ ID NO: 302)), HPRT1 (GenBank Accession No. NM_{—}000194 (SEQ ID NO:337); amplicon—HPRT1-amplicon (SEQ ID NO: 305) (SEQ ID NO: 305)), Ubiquitin (GenBank Accession No. BC000449 (SEQ ID NO:341); amplicon—Ubiquitin-amplicon (SEQ ID NO: 317)) and SDHA (GenBank Accession No. NM_{—}004168 (SEQ ID NO:335); amplicon—SDHA-amplicon (SEQ ID NO:299)), was measured similarly. For each RT sample, the expression of the above amplicon was normalized to the geometric mean of the quantities of the housekeeping genes. The normalized quantity of each RT sample was then divided by the median of the quantities of the normal post-mortem (PM) samples (Sample Nos. 47-50, 90-93, 96-99, Table 1_{—}2 above), to obtain a value of fold up-regulation for each sample relative to the median of the normal PM samples.

[1518] FIG. 59A is a histogram showing over expression of the Homo sapiens homeo box C10 (HOXC10) transcripts detectable by or according to N31842 seg8WT (SEQ ID NO: 400) in cancerous lung samples relative to the normal samples.

[1519] As is evident from FIG. 59A, the expression of Homo sapiens homeo box C10 (HOXC10) transcripts detectable by the above amplicon in cancer samples was significantly higher than in the non-cancerous samples (Sample Nos. 46-50, 90-93, 96-99 Table 1_{—}2). Notably an over-expression of at least 5 fold was found in 8 out of 15 adenocarcinoma samples, 12 out of 16 squamous cell carcinoma samples, 4 out of 4 large cell carcinoma samples and in 1 out of 8 small cells carcinoma samples.

[1520] Statistical analysis was applied to verify the significance of these results, as described below.

[1521] The P value for the difference in the expression levels of Homo sapiens homeo box C10 (HOXC10) transcripts detectable by the above amplicon in lung cancer samples versus the normal tissue samples was determined by T test as 1.17E-02 in Squamous cell carcinoma.

[1522] Threshold of 5 fold overexpression was found to differentiate between cancer and normal samples with P value of 4.76E-03 as checked by exact fisher test in Squamous cell carcinoma. The above values demonstrate statistical significance of the results.

[1523] Primer pairs are also optionally and preferably encompassed within the present invention; for example, for the above experiment, the following primer pair was used as a non-limiting illustrative example only of a suitable primer pair: N31842 seg8WTF (SEQ ID NO: 398) forward primer; and N31842 seg8WTR (SEQ ID NO: 399) reverse primer.

[1524] The present invention also preferably encompasses any amplicon obtained through the use of any suitable primer pair; for example, for the above experiment, the following amplicon was obtained as a non-limiting illustrative example only of a suitable amplicon: N31842 seg8WT (SEQ ID NO: 400).

[1525] Expression of Homo sapiens homeo box C10 (HOXC10) transcripts detectable by or according to seg8WT—N31842_seg8WT (SEQ ID NO: 400) amplicon and primers N31842_seg8WTF (SEQ ID NO: 398) and N31842_seg8WTR (SEQ ID NO: 399) was further measured by real time PCR using enlarged panel as shown in Table 1_{—}6. In parallel the expression of four housekeeping genes—HPRT1 (GenBank Accession No. NM_{—}000194 (SEQ ID NO:337); amplicon—HPRT1-amplicon (SEQ ID NO: 305) (SEQ ID NO: 305)), PBGD (GenBank Accession No. BC019323 (SEQ ID NO:336); amplicon—PBGD-amplicon (SEQ ID NO: 302)), SDHA (GenBank Accession No. NM_{—}004168 (SEQ ID NO:335); amplicon—SDHA-amplicon (SEQ ID NO:299)) and Ubiquitin (GenBank Accession No. BC000449 (SEQ ID NO:341); amplicon—Ubiquitin-amplicon (SEQ ID NO: 317)) was measured similarly. For each RT sample, the expression of the above amplicon was normalized to the normalization factor calculated from the expression of these house keeping genes as described in normalization method 2 in the “materials and methods” section. The normalized quantity of each RT sample was then divided by the median of the quantities of the normal samples (sample numbers 51, 52, 53, 54, 55, 56, 57, 58, 59, 60, 61, 62, 63, 64, 69 and 70, Table 1_{—}6 above), to obtain a value of fold up-regulation for each sample relative to the median of the normal samples.

[1526] FIG. 59B is a histogram showing over expression of the above-indicated Homo sapiens homeo box C10 (HOXC10) transcripts in cancerous Lung samples relative to the normal samples.

[1527] As is evident from FIG. 59B, the expression of Homo sapiens homeo box C10 (HOXC10) transcripts detectable by the above amplicon in non-small cell carcinoma samples was significantly higher than in the non-cancerous samples (sample numbers 51, 52, 53, 54, 55, 56, 57, 58, 59, 60, 61, 62, 63, 64, 69 and 70, Table 1_{—}6 above). Notably an over-expression of at least 10 fold was found in 26 out of 39 non-small cell carcinoma samples, specifically in 10 out of 17 adenocarcinoma samples, in 12 out of 16 squamous cell carcinoma samples, and in 4 out of 6 large cell carcinoma samples.

[1528] Statistical analysis was applied to verify the significance of these results, as described below.

[1529] The P value for the difference in the expression levels of Homo sapiens homeo box C10 (HOXC10) transcripts detectable by the above amplicon in Lung non-small cell carcinoma samples versus the normal tissue samples was determined by T test as 1.12e-002.

[1530] Threshold of 10 fold over expression was found to differentiate between non-small cell carcinoma and normal samples with P value of 3.49e-005 as checked by exact Fisher test. Threshold of 10 fold over expression was found to differentiate between adenocarcinoma and normal samples with P value of 1.66e-003 as checked by exact Fisher test. Threshold of 10 fold over expression was found to differentiate between squamous cell carcinoma and normal samples with P value of 8.50e-005 as checked by exact Fisher test. Threshold of 10 fold over expression was found to differentiate between large cell carcinoma and normal samples with P value of 9.23e-003 as checked by exact Fisher test.

[1531] The above values demonstrate statistical significance of the results.

[1532] Primer pairs are also optionally and preferably encompassed within the present invention; for example, for the above experiment, the following primer pair was used as a non-limiting illustrative example only of a suitable primer pair: N31842_seg8WTF (SEQ ID NO: 398) forward primer; and N31842_seg8WTR (SEQ ID NO: 399) reverse primer.

[1533] The present invention also preferably encompasses any amplicon obtained through the use of any suitable primer pair; for example, for the above experiment, the following amplicon was obtained as a non-limiting illustrative example only of a suitable amplicon: N31842_seg8WT (SEQ ID NO: 400).

Expression of Homo sapiens Homeo Box C10 (HOXC10)N31842 Transcripts which are Detectable by Amplicon as Depicted in Sequence Name N31842_seg8 (SEQ ID NO: 400) in Different Normal Tissues

[1534] Expression of Homo sapiens homeo box C10 (HOXC10) transcripts detectable by or according to seg8-N31842_seg8 (SEQ ID NO: 400) amplicon and primers N31842_seg8F (SEQ ID NO: 398) and N31842_seg8R (SEQ ID NO: 399) was measured by real time PCR. In parallel the expression of four housekeeping genes—SDHA (GenBank Accession No. NM_{—}004168 (SEQ ID NO:335); amplicon—SDHA-amplicon (SEQ ID NO:299)), Ubiquitin (GenBank Accession No. BC000449 (SEQ ID NO:341); amplicon—Ubiquitin-amplicon (SEQ ID NO: 317)), RPL19 (GenBank Accession No. NM_{—}000981 (SEQ ID NO:342); RPL19 amplicon (SEQ ID NO: 320)) and TATA box (GenBank Accession No. NM_{—}003194 (SEQ ID NO:343); TATA amplicon (SEQ ID NO: 323)) was measured similarly. For each RT sample, the expression of the above amplicon was normalized to the geometric mean of the quantities of the housekeeping genes. The normalized quantity of each RT sample was then divided by the median of the quantities of the lung samples (sample numbers 15, 16 and 17, Table 1_{—}9 above), to obtain a value of relative expression of each sample relative to the median of the lung samples. FIG. 60 shows expression of Homo sapiens homeo box C10 (HOXC10)N31842 transcripts which are detectable by amplicon as depicted in sequence name N31842_seg8 (SEQ ID NO: 400) in different normal tissues.

Expression of Homo sapiens Homeo Box C10 (HOXC10)N31842 Transcripts which are Detectable by Amplicon as Depicted in Sequence Name N31842_seg8 (SEQ ID NO: 400) in Normal and Cancerous Breast Tissues

[1535] Expression of Homo sapiens homeo box C10 (HOXC10) transcripts detectable by or according to seg8-N31842_seg8 (SEQ ID NO: 400) amplicon and primers N31842_seg8F (SEQ ID NO: 398) and N31842_seg8R (SEQ ID NO: 399) was measured by real time PCR. In parallel the expression of four housekeeping genes—G6PD (GenBank Accession No. NM_{—}000402 (SEQ ID NO:339); G6PD amplicon (SEQ ID NO: 311)), HPRT1 (GenBank Accession No. NM_{—}000194 (SEQ ID NO:337); amplicon—HPRT1-amplicon (SEQ ID NO: 305) (SEQ ID NO: 305)), PBGD (GenBank Accession No. BC019323 (SEQ ID NO:336); amplicon—PBGD-amplicon (SEQ ID NO: 302)) and SDHA (GenBank Accession No. NM_{—}004168 (SEQ ID NO:335); amplicon—SDHA-amplicon (SEQ ID NO:299)) was measured similarly. For each RT sample, the expression of the above amplicon was normalized to the geometric mean of the quantities of the housekeeping genes. The normalized quantity of each RT sample was then divided by the median of the quantities of the normal post-mortem (PM) samples (sample numbers 57, 59, 60, 63, 66, 64, 56, 65, 67 and 58, Table 1_{—}3 above), to obtain a value of fold up-regulation for each sample relative to the median of the normal PM samples.

[1536] FIG. 61 is a histogram showing over expression of the Homo sapiens homeo box C10 (HOXC10) transcripts detectable by or according to N31842_seg8 (SEQ ID NO: 400) in cancerous breast samples relative to the normal samples.

[1537] As is evident from FIG. 61, the expression of Homo sapiens homeo box C10 (HOXC₁₀) transcripts detectable by the above amplicon in cancer samples was significantly higher than in the non-cancerous samples (sample numbers 57, 59, 60, 63, 66, 64, 56, 65, 67 and 58, Table 1_{—}3 above), mainly in patient with age above 50.

[1538] Notably an over-expression of at least 5 fold was found in 14 out of 28 adenocarcinoma samples.

[1539] Statistical analysis was applied to verify the significance of these results, as described below.

[1540] Threshold of 5 fold overexpression was found to differentiate between cancer and normal samples with P value of 2.83E-02 as checked by exact fisher test. The above values demonstrate statistical significance of the results.

[1541] Primer pairs are also optionally and preferably encompassed within the present invention; for example, for the above experiment, the following primer pair was used as a non-limiting illustrative example only of a suitable primer pair: N31842_seg8F (SEQ ID NO: 398) forward primer; and N31842_seg8R (SEQ ID NO: 399) reverse primer.

[1542] The present invention also preferably encompasses any amplicon obtained through the use of any suitable primer pair; for example, for the above experiment, the following amplicon was obtained as a non-limiting illustrative example only of a suitable amplicon: N31842_seg8 (SEQ ID NO: 400).

Expression of Homo sapiens Homeo Box C10 (HOXC10) N31842 Transcripts which are Detectable by Amplicon as Depicted in Sequence Name N31842_seg6 (SEQ ID NO: 403) in Normal and Cancerous Breast Tissues

[1543] Expression of Homo sapiens homeo box C10 (HOXC10) transcripts detectable by or according to seg6-N31842_seg6 (SEQ ID NO: 403) amplicon and primers N31842_seg6F (SEQ ID NO: 401) and N31842_seg6R (SEQ ID NO: 402) was measured by real time PCR. In parallel the expression of four housekeeping genes—G6PD (GenBank Accession No. NM_{—}000402 (SEQ ID NO:339); G6PD amplicon (SEQ ID NO: 311)), HPRT1 (GenBank Accession No. NM_{—}000194 (SEQ ID NO:337); amplicon—HPRT1-amplicon (SEQ ID NO: 305) (SEQ ID NO: 305)), PBGD (GenBank Accession No. BC019323 (SEQ ID NO:336); amplicon—PBGD-amplicon (SEQ ID NO: 302)) and SDHA (GenBank Accession No. NM_{—}004168 (SEQ ID NO:335); amplicon—SDHA-amplicon (SEQ ID NO:299)) was measured similarly. For each RT sample, the expression of the above amplicon was normalized to the geometric mean of the quantities of the housekeeping genes. The normalized quantity of each RT sample was then divided by the median of the quantities of the normal post-mortem (PM) samples (sample numbers 57, 59, 60, 63, 66, 64, 56, 65, 67 and 58, Table 1_{—}3 above), to obtain a value of fold up-regulation for each sample relative to the median of the normal PM samples.

[1544] FIG. 62A is a histogram showing over expression of the Homo sapiens homeo box C10 (HOXC10) detectable by or according to N31842_seg6 (SEQ ID NO: 403) in cancerous Breast samples relative to the normal samples.

[1545] As is evident from FIG. 62A, the expression of Homo sapiens homeo box C10 (HOXC10) transcripts detectable by the above amplicon in cancer samples was significantly higher than in the non-cancerous samples (sample numbers 57, 59, 60, 63, 66, 64, 56, 65, 67 and 58, Table 1_{—}3 above), mainly in patient with age above 50. Notably an over-expression of at least 5 fold was found in 14 out of 28 adenocarcinoma samples.

[1546] Statistical analysis was applied to verify the significance of these results, as described below.

[1547] Threshold of 5 fold overexpression was found to differentiate between cancer and normal samples with P value of 2.83E-02 as checked by exact fisher test. The above values demonstrate statistical significance of the results.

[1548] Primer pairs are also optionally and preferably encompassed within the present invention; for example, for the above experiment, the following primer pair was used as a non-limiting illustrative example only of a suitable primer pair: N31842_seg6F (SEQ ID NO: 401) forward primer; and N31842_seg6R (SEQ ID NO: 402) reverse primer.

[1549] The present invention also preferably encompasses any amplicon obtained through the use of any suitable primer pair; for example, for the above experiment, the following amplicon was obtained as a non-limiting illustrative example only of a suitable amplicon: N31842_seg6 (SEQ ID NO: 403).

[1550] Expression of Homo sapiens homeo box C10 (HOXC10) transcripts detectable by or according to seg6-N31842_seg6 (SEQ ID NO: 403) amplicon and primers N31842_seg6F (SEQ ID NO: 401) and N31842_seg6R (SEQ ID NO: 402) was further measured by real time PCR using enlarged panel as shown in Table 1_{—}7. In parallel the expression of four housekeeping genes—G6PD (GenBank Accession No. NM_{—}000402 (SEQ ID NO:339); G6PD amplicon (SEQ ID NO: 311)), RPL19 (GenBank Accession No. NM_{—}000981 (SEQ ID NO:342); RPL19 amplicon (SEQ ID NO: 320)), PBGD (GenBank Accession No. BC019323 (SEQ ID NO:336); amplicon—PBGD-amplicon (SEQ ID NO: 302)) and SDHA (GenBank Accession No. NM_{—}004168 (SEQ ID NO:335); amplicon—SDHA-amplicon (SEQ ID NO:299)) was measured similarly. For each RT sample, the expression of the above amplicon was normalized to the normalization factor calculated from the expression of these house keeping genes as described in normalization method 2 in the “materials and methods” section. The normalized quantity of each RT sample was then divided by the median of the quantities of the normal samples (sample numbers 43, 45, 46, 47, 48, 49, 50, 51, 52, 54, 56, 58, 59, 60, 61, 62, 63, 64, 65, 66, 67, 68 and 69, Table 1_{—}7 above), to obtain a value of fold up-regulation for each sample relative to the median of the normal samples.

[1551] FIG. 62B is a histogram showing over expression of the above-indicated Homo sapiens homeo box C10 (HOXC10) transcripts in cancerous Breast samples relative to the normal samples.

[1552] As is evident from FIG. 62B, the expression of Homo sapiens homeo box C10 (HOXC10) transcripts detectable by the above amplicon in cancer samples was significantly higher than in the non-cancerous samples (sample numbers 43, 45, 46, 47, 48, 49, 50, 51, 52, 54, 56, 58, 59, 60, 61, 62, 63, 64, 65, 66, 67, 68 and 69, Table 1_{—}7 above). Notably an over-expression of at least 10 fold was found in 11 out of 37 adenocarcinoma samples. The over expression was observed mainly in patients with age above 48—in 10 of 21 IDC patients with age above 48.

[1553] Statistical analysis was applied to verify the significance of these results, as described below.

[1554] The P value for the difference in the expression levels of Homo sapiens homeo box C10 (HOXC10) transcripts detectable by the above amplicon in all Breast cancer samples versus the normal tissue samples was determined by T test as 5.69e-004 for all adenocarcinoma samples.

[1555] Threshold of 10 fold over expression was found to differentiate between all cancer samples and normal samples with P value of 1.53e-002 as checked by exact Fisher test. Threshold of 10 fold over expression was found to differentiate between IDC samples from patients with age above 48 and normal samples with P value of 2.87e-03 as checked by exact Fisher test.

[1556] The above values demonstrate statistical significance of the results.

[1557] Primer pairs are also optionally and preferably encompassed within the present invention; for example, for the above experiment, the following primer pair was used as a non-limiting illustrative example only of a suitable primer pair: N31842_seg6F (SEQ ID NO: 401) forward primer; and N31842_seg6R (SEQ ID NO: 402) reverse primer.

[1558] The present invention also preferably encompasses any amplicon obtained through the use of any suitable primer pair; for example, for the above experiment, the following amplicon was obtained as a non-limiting illustrative example only of a suitable amplicon: N31842_seg6 (SEQ ID NO: 403).

Expression of Homo sapiens Homeo Box C10 (HOXC10) N31842 Transcripts which are Detectable by Amplicon as Depicted in Sequence Name N31842_seg6 (SEQ ID NO: 403) in Normal and Cancerous Colon Tissues

[1559] Expression of Homo sapiens homeo box C10 (HOXC10) transcripts detectable by or according to seg6, N31842_seg6 (SEQ ID NO: 403) amplicon and primers N31842_seg6F (SEQ ID NO: 401) N31842_seg6R (SEQ ID NO: 402) was measured by real time PCR. In parallel the expression of four housekeeping genes—PBGD (GenBank Accession No. BC019323 (SEQ ID NO:336); amplicon—PBGD-amplicon (SEQ ID NO: 302)), HPRT1 (GenBank Accession No. NM_{—}000194 (SEQ ID NO:337); amplicon—HPRT1-amplicon (SEQ ID NO: 305) (SEQ ID NO: 305)) and G6PD (GenBank Accession No. NM_{—}000402 (SEQ ID NO:339); G6PD amplicon (SEQ ID NO: 311)), was measured similarly. For each RT sample, the expression of the above amplicon was normalized to the normalization factor calculated from the expression of these house keeping genes as described in normalization method 2 in the “materials and methods” section. The normalized quantity of each RT sample was then divided by the median of the quantities of the normal samples (Sample Nos. 52, 42, 43, 44, 45, 46, 47, 48, 49, 50, 51, 53, 54, 55, 56, 57, 58, 59, 60, 61, 62, 63 and 64, Table 1_{—}8, above), to obtain a value of fold differential expression for each sample relative to the median of the normal samples.

[1560] In one experiment that was carried out no differential expression in the cancerous samples relative to the normal samples was observed.

[1561] Primer pairs are also optionally and preferably encompassed within the present invention; for example, for the above experiment, the following primer pair was used as a non-limiting illustrative example only of a suitable primer pair: N31842_seg6F (SEQ ID NO: 401) forward primer; and N31842_seg6R (SEQ ID NO: 402) reverse primer.

[1562] The present invention also preferably encompasses any amplicon obtained through the use of any suitable primer pair; for example, for the above experiment, the following amplicon was obtained as a non-limiting illustrative example only of a suitable amplicon: N31842_seg6 (SEQ ID NO: 403).

Expression of Homo sapiens Homeo Box C10 (HOXC10) N31842 Transcripts which are Detectable by Amplicon as Depicted in Sequence Name N31842_seg6 (SEQ ID NO: 403) in Different Normal Tissues

[1563] Expression of Homo sapiens homeo box C10 (HOXC10) transcripts detectable by or according to seg6-N31842_seg6 (SEQ ID NO: 403) amplicon and primers N31842_seg6F (SEQ ID NO: 401) and N31842_seg6R (SEQ ID NO: 402) was measured by real time PCR. In parallel the expression of four housekeeping genes—SDHA (GenBank Accession No. NM_{—}004168 (SEQ ID NO:335); amplicon—SDHA-amplicon (SEQ ID NO:299)), Ubiquitin (GenBank Accession No. BC000449 (SEQ ID NO:341); amplicon—Ubiquitin-amplicon (SEQ ID NO: 317)), RPL19 (GenBank Accession No. NM_{—}000981 (SEQ ID NO:342); RPL19 amplicon (SEQ ID NO: 320)) and TATA box (GenBank Accession No. NM_{—}003194 (SEQ ID NO:343); TATA amplicon (SEQ ID NO: 323)) was measured similarly. For each RT sample, the expression of the above amplicon was normalized to the geometric mean of the quantities of the housekeeping genes. The normalized quantity of each RT sample was then divided by the median of the quantities of the lung samples (sample numbers 15, 16 and 17, Table 1_{—}9 above), to obtain a value of relative expression of each sample relative to the median of the lung samples. FIG. 63A shows expression of Homo sapiens homeo box C10 (HOXC10)N31842 transcripts which are detectable by amplicon as depicted in sequence name N31842_seg6 (SEQ ID NO: 403) in different normal tissues.

[1564] Expression of Homo sapiens homeo box C10 (HOXC10) transcripts detectable by or according to seg6—N31842_seg6 (SEQ ID NO: 403) amplicon and primers N31842_seg6F (SEQ ID NO: 401) and N31842_seg6R (SEQ ID NO: 402) was further measured by real time PCR using updated panel as shown in Table 1_{—}10. In parallel the expression of three housekeeping genes—SDHA (GenBank Accession No. NM_{—}004168 (SEQ ID NO:335); amplicon—SDHA-amplicon (SEQ ID NO:299)), Ubiquitin (GenBank Accession No. BC000449 (SEQ ID NO:341); amplicon—Ubiquitin-amplicon (SEQ ID NO: 317)) and TATA box (GenBank Accession No. NM_{—}003194 (SEQ ID NO:343); TATA amplicon (SEQ ID NO: 323)) was measured similarly. For each RT sample, the expression of the above amplicon was normalized to the normalization factor calculated from the expression of these house keeping genes as described in normalization method 2 in the “materials and methods” section. The normalized quantity of each RT sample was then divided by the median of the quantities of the Lung samples (sample numbers 26, 27 and 29, Table 1_{—}10 above), to obtain a value of relative expression of each sample relative to the median of the Lung samples.

[1565] As shown in FIG. 63B Homo sapiens homeo box C10 (HOXC10) transcripts detectable by the above amplicon are highly expressed in kidney tissues.

[1566] Expression of Homo sapiens Homeo Box C10 (HOXC10)N31842 Transcripts which are Detectable by Amplicon as Depicted in Sequence Name N31842_seg6 (SEQ ID NO: 403) in Normal and Cancerous Ovary Tissues

[1567] Expression of Homo sapiens homeo box C10 (HOXC10) transcripts detectable by or according to seg6—N31842_seg6 (SEQ ID NO: 403) amplicon and primers N31842_seg6F (SEQ ID NO: 401) and N31842_seg6R (SEQ ID NO: 402) was measured by real time PCR. In parallel the expression of three housekeeping genes—SDHA (GenBank Accession No. NM_{—}004168 (SEQ ID NO:335); amplicon—SDHA-amplicon (SEQ ID NO:299)), HPRT1 (GenBank Accession No. NM_{—}000194 (SEQ ID NO:337); amplicon—HPRT1-amplicon (SEQ ID NO: 305) (SEQ ID NO: 305)), G6PD (GenBank Accession No. NM_{—}000402 (SEQ ID NO:339); G6PD amplicon (SEQ ID NO: 311)) was measured similarly. For each RT sample, the expression of the above amplicon was normalized to the normalization factor calculated from the expression of these house keeping genes as described in normalization method 2 in the “materials and methods” section. The normalized quantity of each RT sample was then divided by the median of the quantities of the normal samples (sample numbers 52, 53, 54, 55, 56, 57, 58, 59, 60, 61, 62, 63, 64, 65, 66, 67, 68, 69, 70, 71, 72, 73, 74, 75, 76, 77 and 78, Table 1_{—}5 above), to obtain a value of fold up-regulation for each sample relative to the median of the normal samples.

[1568] FIG. 64 is a histogram showing over expression of the above-indicated Homo sapiens homeo box C10 (HOXC10) transcripts in cancerous Ovary samples relative to the normal samples.

[1569] As is evident from FIG. 64, the expression of Homo sapiens homeo box C10 (HOXC10) transcripts detectable by the above amplicon in serous carcinoma and adenocarcinoma samples was significantly higher than in the non-cancerous samples (sample numbers 52, 53, 54, 55, 56, 57, 58, 59, 60, 61, 62, 63, 64, 65, 66, 67, 68, 69, 70, 71, 72, 73, 74, 75, 76, 77 and 78, Table 1_{—}5 above) and was higher in a few mucinous carcinoma samples than in the non-cancerous samples. Notably an over-expression of at least 10 fold was found in 12 out of 40 adenocarcinoma samples, specifically in 2 out of 18 serous carcinoma samples, in 4 out of 10 endometroid samples, and in 4 out of 9 mucinous carcinoma samples.

[1570] Statistical analysis was applied to verify the significance of these results, as described below.

[1571] The P value for the difference in the expression levels of Homo sapiens homeo box C10 (HOXC10) transcripts detectable by the above amplicon in Ovary adenocarcinoma samples versus the normal tissue samples was determined by T test as 7.12e-03.

[1572] Threshold of 10 fold over expression was found to differentiate between adenocarcinoma and normal samples with P value of 6.42e-03 as checked by exact Fisher test.

[1573] Primer pairs are also optionally and preferably encompassed within the present invention; for example, for the above experiment, the following primer pair was used as a non-limiting illustrative example only of a suitable primer pair: N31842_seg6F (SEQ ID NO: 401) forward primer; and N31842_seg6R (SEQ ID NO: 402) reverse primer.

[1574] The present invention also preferably encompasses any amplicon obtained through the use of any suitable primer pair; for example, for the above experiment, the following amplicon was obtained as a non-limiting illustrative example only of a suitable amplicon: N31842_seg6 (SEQ ID NO: 403).

Expression of Homo sapiens Homeo Box C10 (HOXC10) N31842 Transcripts which are Detectable by Amplicon as Depicted in Sequence Name N31842_seg6 (SEQ ID NO: 403) in Normal and Cancerous Lung Tissues

[1575] Expression of Homo sapiens homeo box C10 (HOXC10) transcripts detectable by or according to seg6—N31842_seg6 (SEQ ID NO: 403) amplicon and primers N31842_seg6F (SEQ ID NO: 401) and N31842_seg6R (SEQ ID NO: 402) was measured by real time PCR. In parallel the expression of four housekeeping genes—HPRT1 (GenBank Accession No. NM_{—}000194 (SEQ ID NO:337); amplicon—HPRT1-amplicon (SEQ ID NO: 305) (SEQ ID NO: 305)), PBGD (GenBank Accession No. BC019323 (SEQ ID NO:336); amplicon—PBGD-amplicon (SEQ ID NO: 302)), SDHA (GenBank Accession No. NM_{—}004168 (SEQ ID NO:335); amplicon—SDHA-amplicon (SEQ ID NO:299)) and Ubiquitin (GenBank Accession No. BC000449 (SEQ ID NO:341); amplicon—Ubiquitin-amplicon (SEQ ID NO: 317)) was measured similarly. For each RT sample, the expression of the above amplicon was normalized to the normalization factor calculated from the expression of these house keeping genes as described in normalization method 2 in the “materials and methods” section. The normalized quantity of each RT sample was then divided by the median of the quantities of the normal samples (sample numbers 51, 52, 53, 54, 55, 56, 57, 58, 59, 60, 61, 62, 63, 64, 69 and 70, Table 1_{—}6 above), to obtain a value of fold up-regulation for each sample relative to the median of the normal samples.

[1576] FIG. 65 is a histogram showing over expression of the above-indicated Homo sapiens homeo box C10 (HOXC10) transcripts in cancerous Lung samples relative to the normal samples.

[1577] As is evident from FIG. 65, the expression of Homo sapiens homeo box C10 (HOXC10) transcripts detectable by the above amplicon in non-small cell carcinoma samples was significantly higher than in the non-cancerous samples (sample numbers 51, 52, 53, 54, 55, 56, 57, 58, 59, 60, 61, 62, 63, 64, 69 and 70, Table 1_{—}6 above) and was higher in a few small cell carcinoma samples than in the non-cancerous samples. Notably an over-expression of at least 5 fold was found in 44 out of 61 non-small cell carcinoma samples, specifically in 18 out of 26 adenocarcinoma samples, in 19 out of 25 squamous cell carcinoma samples, in 7 out of 10 large cell carcinoma samples, and also in 3 out of 9 small cell carcinoma samples and

[1578] Statistical analysis was applied to verify the significance of these results, as described below.

[1579] The P value for the difference in the expression levels of Homo sapiens homeo box C10 (HOXC10) transcripts detectable by the above amplicon in Lung non-small cell carcinoma samples versus the normal tissue samples was determined by T test as 2.17e-004. The P value for the difference in the expression levels of Homo sapiens homeo box C10 (HOXC10) transcripts detectable by the above amplicon in Lung adenocarcinoma samples versus the normal tissue samples was determined by T test as 1.35e-002. The P value for the difference in the expression levels of Homo sapiens homeo box C10 (HOXC10) transcripts detectable by the above amplicon in Lung squamous cell carcinoma samples versus the normal tissue samples was determined by T test as 1.81 e-002.

[1580] Threshold of 5 fold over expression was found to differentiate between non-small cell carcinoma and normal samples with P value of 8.25e-004 as checked by exact Fisher test. Threshold of 5 fold over expression was found to differentiate between adenocarcinoma and normal samples with P value of 6.20e-003 as checked by exact Fisher test. Threshold of 5 fold over expression was found to differentiate between squamous cell carcinoma and normal samples with P value of 1.72e-003 as checked by exact Fisher test. Threshold of 5 fold over expression was found to differentiate between large cell carcinoma and normal samples with P value of 3.05e-002 as checked by exact Fisher test.

[1581] The above values demonstrate statistical significance of the results.

[1582] Primer pairs are also optionally and preferably encompassed within the present invention; for example, for the above experiment, the following primer pair was used as a non-limiting illustrative example only of a suitable primer pair: N31842_seg6F (SEQ ID NO: 401) forward primer; and N31842_seg6R (SEQ ID NO: 402) reverse primer.

[1583] The present invention also preferably encompasses any amplicon obtained through the use of any suitable primer pair; for example, for the above experiment, the following amplicon was obtained as a non-limiting illustrative example only of a suitable amplicon: N31842_seg6 (SEQ ID NO: 403).

### Description for Cluster T58132

[1584] Cluster T58132 features 7 transcript(s) and 11 segment(s) of interest, the names for which are given in Tables 129 and 130, respectively, the sequences themselves are given in the “Sequence Listing” of the application. The selected protein variants are given in table 131.

TABLE 129
Transcripts of interest
Transcript Name

T58132_T2 (SEQ ID NO: 187)
T58132_T4 (SEQ ID NO: 188)
T58132_T7 (SEQ ID NO: 189)
T58132_T9 (SEQ ID NO: 190)
T58132_T10 (SEQ ID NO: 191)
T58132_T11 (SEQ ID NO: 192)
T58132_T12 (SEQ ID NO: 193)

TABLE 130
Segments of interest
Segment Name

T58132_N6 (SEQ ID NO: 194)
T58132_N8 (SEQ ID NO: 195)
T58132_N9 (SEQ ID NO: 196)
T58132_N13 (SEQ ID NO: 197)
T58132_N15 (SEQ ID NO: 198)
T58132_N21 (SEQ ID NO: 199)
T58132_N2 (SEQ ID NO: 200)
T58132_N4 (SEQ ID NO: 201)
T58132_N11 (SEQ ID NO: 202)
T58132_N17 (SEQ ID NO: 203)
T58132_N19 (SEQ ID NO: 204)

TABLE 131
Proteins of interest

| Protein Name | Corresponding Transcript(s) |
|---|---|
| T58132_P0 (SEQ ID NO: 213) | T58132_T4 (SEQ ID NO: 188) |
| T58132_P1 (SEQ ID NO: 214) | T58132_T7 (SEQ ID NO: 189) |
| T58132_P2 (SEQ ID NO: 215) | T58132_T10 (SEQ ID NO: 191); |
| | T58132_T9 (SEQ ID NO: 190) |
| T58132_P12 (SEQ ID NO: 216) | T58132_T2 (SEQ ID NO: 187) |
| T58132_P13 (SEQ ID NO: 217) | T58132_T11 (SEQ ID NO: 192); |
| | T58132_T12 (SEQ ID NO: 193) |

[1585] These sequences are variants of the known protein LEM domain containing 1a (SEQ ID NO: 205) (SwissProt accession identifier Q6L9U4_HUMAN), referred to herein as the previously known protein.

[1586] The following GO Annotation(s) apply to the previously known protein. The following annotation(s) were found: nuclear membrane, which are annotation(s) related to Cellular Component.

[1587] The GO assignment relies on information from one or more of the SwissProt/TremB1 Protein knowledgebase, available from <http://www.expasy.ch/sprot/>; or Locuslink, available from <http://www.ncbi.nlm.nih.gov/projects/LocusLinkl>.

[1588] Variant proteins T58132_P2 and T58132_P12 were previously disclosed (in published PCT application nos WO2005/071058 and WO2004/104161, respectively, both of which are hereby incorporated by reference as if fully set forth herein) but have now unexpectedly been found to have novel diagnostic properties, including but not limited to such properties for diagnosis of colon, lung and/or ovarian cancer.

[1589] As noted above, cluster T58132 features 7 transcript(s), which were listed in Table 129 above. These transcript(s) encode for protein(s) which are variant(s) of protein LEM domain containing 1A (SEQ ID NO: 205). A description of each variant protein according to the present invention is now provided.

[1590] Variant protein T58132_P0 (SEQ ID NO: 213) according to the present invention has an amino acid sequence as given in the “Sequence Listing” of the application; it is encoded by transcript(s) T58132_T4 (SEQ ID NO: 188). An alignment is given to the known protein (LEM domain containing 1A, SEQ ID NOs:205-212) in the alignment table, on the attached CDROM. One or more alignments to one or more previously published protein sequences are given in the alignment table, on the attached CDROM. A brief description of the relationship of the variant protein according to the present invention to each such aligned protein is as follows:

### 1. Comparison Report Between T58132_P0 (SEQ ID NO: 213) and Q6L9U4_HUMAN (SEQ ID NO:425):

[1591] A. An isolated chimeric polypeptide encoding for T58132_P0 (SEQ ID NO: 213), comprising a first amino acid sequence being at least about 70%, optionally at least 80%, preferably at least 85%, more preferably at least 90% and most preferably at least 95%, homologous to a polypeptide having the sequence AAWKAGSGSAGNCEADCEGKGALLSPPGFYHQKRGQTSII (SEQ ID NO: 508) corresponding to amino acids 1-40 of T58132_P0 (SEQ ID NO: 213), and a second amino acid sequence being at least about 90% homologous to MVDVKCLSDCKLQNQLEKLGFSPGPILPSTRKLYEKKLVQLLVSPPCAPPVMNGPRELDGAQDSDDSEEL NIILQGNIILSTEKSKKLKKWPEASTTKRKAVDTYCLDYKPSKGRRWAARAPSTRITYGTITKERDYCAED QTIESWREEGFPVGLKLAVLGIFIIVVFVYLTVENKSLFG corresponding to amino acids 1-181 of Q6L9U4_HUMAN (SEQ ID NO:425), which also corresponds to amino acids 41-221 of T58132_P0 (SEQ ID NO: 213), wherein said first amino acid sequence and second amino acid sequence are contiguous and in a sequential order.

[1592] B. An isolated polypeptide encoding for a head of T58132_P0 (SEQ ID NO: 213), comprising a polypeptide being at least 70%, optionally at least about 80%, preferably at least about 85%, more preferably at least about 90% and most preferably at least about 95% homologous to the sequence

(SEQ ID NO: 508)

AAWKAGSGSAGNCEADCEGKGALLSPPGFYHQKRGQTSII
of

(SEQ ID NO: 213)

T58132_P0.

### 2. Comparison Report Between T58132_P0 (SEQ ID NO: 213) and Q68G75_HUMAN (SEQ ID NO: 209):

[1593] A. An isolated chimeric polypeptide encoding for T58132_P0 (SEQ ID NO: 213), comprising a first amino acid sequence being at least about 70%, optionally at least 80%, preferably at least 85%, more preferably at least 90% and most preferably at least 95%, homologous to a polypeptide having the sequence AAWKAGSGSAGNCEADCEGKGALLSPPGFYHQKRGQTSII (SEQ ID NO: 508) corresponding to amino acids 1-40 of T58132_P0 (SEQ ID NO: 213), a second amino acid sequence being at least about 90% homologous to MVDVKCLSDCKLQNQLEKLGFSPGPILPSTRKLYEKKLVQLLVSPPCAPPVMNGPRELDGAQDSDDSEEL NIILQGNIILST corresponding to amino acids 1-82 of Q68G75_HUMAN (SEQ ID NO: 209), which also corresponds to amino acids 41-122 of T58132_P0 (SEQ ID NO: 213), a bridging amino acid E corresponding to amino acid 123 of T58132_P0 (SEQ ID NO: 213), and a third amino acid sequence being at least about 90% homologous to KSKKLLKKWPEASTTKRKAVDTYCLDYKPSKGRRWAARAPSTRITYGTITKERDYCAEDQTIESWREEGFP VGLKLAVLGIFIIVVFVYLTVENKSLFG corresponding to amino acids 84-181 of Q68G75_HUMAN (SEQ ID NO: 209), which also corresponds to amino acids 124-221 of T58132_P0 (SEQ ID NO: 213), wherein said first amino acid sequence, second amino acid sequence, bridging amino acid and third amino acid sequence are contiguous and in a sequential order.

### 3. Comparison Report Between T58132_P0 (SEQ ID NO: 213) and Q6L9U2_HUMAN (SEQ ID NO: 212):

[1594] A. An isolated chimeric polypeptide encoding for T58132_P0 (SEQ ID NO: 213), comprising a first amino acid sequence being at least about 70%, optionally at least 80%, preferably at least 85%, more preferably at least 90% and most preferably at least 95%, homologous to a polypeptide having the sequence AAWKAGSGSAGNCEADCEGKGALLSPPGFYHQKRGQTSII (SEQ ID NO: 508) corresponding to amino acids 1-40 of T58132_P0 (SEQ ID NO: 213), a second amino acid sequence being at least about 90% homologous to MVDVKCLSDCKLQNQLEKLGFSPGPIL corresponding to amino acids 1-27 of Q6L9U2_HUMAN (SEQ ID NO: 212), which also corresponds to amino acids 41-67 of T58132_P0 (SEQ ID NO: 213), a third amino acid sequence being at least about 70%, optionally at least 80%, preferably at least 85%, more preferably at least 90% and most preferably at least 95% homologous to a polypeptide having the sequence PSTRKLYEKKLVQLLVSPPCAPPVMNGPRELDGAQDSDDSEE (SEQ ID NO: 509) corresponding to amino acids 68-109 of T58132_P0 (SEQ ID NO: 213), and a fourth amino acid sequence being at least about 90% homologous to LNIILQGNIILSTEKSKKLKKWPEAST AVDTYCLDYKPSKGRRWAARAPSTRITYGTITKERD YCAEDQTIESWREEGFPVGLKLAVLGIFIIVVFVYLTVENKSLFG corresponding to amino acids 29-140 of Q6L9U2_HUMAN (SEQ ID NO: 212), which also corresponds to amino acids 110-221 of T58132_P0 (SEQ ID NO: 213), wherein said first amino acid sequence, second amino acid sequence, third amino acid sequence and fourth amino acid sequence are contiguous and in a sequential order.

[1595] C. An isolated polypeptide encoding for an edge portion of T58132_P0 (SEQ ID NO: 213), comprising an amino acid sequence being at least about 70%, optionally at least about 80%, preferably at least about 85%, more preferably at least about 90% and most preferably at least about 95% homologous to the sequence

(SEQ ID NO: 509)

PSTRKLYEKKLVQLLVSPPGAPPVMNGPRELDGAQDSDDSEE
of

(SEQ ID NO: 213)

T58132_P0.

[1596] The localization of the variant protein was determined according to results from a number of different software programs and analyses, including analyses from SignalP and other specialized programs. The variant protein is believed to be membranal.

[1597] Variant protein T58132_P0 (SEQ ID NO: 213) also has the following non-silent SNPs (Single Nucleotide Polymorphisms) as listed in Table 132, (given according to their position(s) on the amino acid sequence, with the alternative amino acid(s) listed).

TABLE 132
Amino acid mutations

| SNP position(s) on amino acid | |
|---|---|
| sequence | Alternative amino acid(s) |
| 139 | R -> C |

[1598] Variant protein T58132_P0 (SEQ ID NO: 213) is encoded by the following transcript(s): T58132_T4 (SEQ ID NO: 188), for which the coding portion starts at position 1 and ends at position 663. The transcript also has the following SNPs as listed in Table 133 (given according to their position on the nucleotide sequence, with the alternative nucleic acid listed).

TABLE 133
Nucleic acid SNPs

| | SNP position(s) on nucleotide |
|---|---|
| Polymorphism | sequence |
| C -> T | 415 |

[1599] Variant protein T58132_P1 (SEQ ID NO: 214) according to the present invention has an amino acid sequence as given in the “Sequence Listing” of the application; it is encoded by transcript(s) T58132_T7 (SEQ ID NO: 189). An alignment is given to the known protein (LEM domain containing 1A, SEQ ID NOs:205-212) in the alignment table, on the attached CDROM. One or more alignments to one or more previously published protein sequences are given in the alignment table, on the attached CDROM. A brief description of the relationship of the variant protein according to the present invention to each such aligned protein is as follows:

### 1. Comparison Report Between T58132_P1 (SEQ ID NO: 214) and NP_{—}001001552 (SEQ ID NO: 206) (or Q6L9UO_HUMAN (SEQ ID NO: 210)):

[1600] A. An isolated chimeric polypeptide encoding for T58132_P1 (SEQ ID NO: 214), comprising a first amino acid sequence being at least about 70%, optionally at least 80%, preferably at least 85%, more preferably at least 90% and most preferably at least 95%, homologous to a polypeptide having the sequence AAWKAGSGSAGNCEADCEGKGALLSPPGFYFIQKRGQTSII (SEQ ID NO: 508) corresponding to amino acids 1-40 of T58132_P1 (SEQ ID NO: 214), and a second amino acid sequence being at least about 90% homologous to MVDVKCLSDCKLQNQLEKLGFSPGPILPSTRKLYEKKLVQLLVSPPCAPPVMNGPRELDGAQDSDDSEGG LQEHQAPESHMGLSPKRETTARKTRLSRAGEKKVSQWA corresponding to amino acids 1-108 of NP_{—}001001552 (SEQ ID NO: 206), which also corresponds to amino acids 41-148 of T58132_P1 (SEQ ID NO: 214), wherein said first amino acid sequence and second amino acid sequence are contiguous and in a sequential order.

[1601] The localization of the variant protein was determined according to results from a number of different software programs and analyses, including analyses from SignalP and other specialized programs. The variant protein is believed to be located intracellularly with regard to the cell.

[1602] Variant protein T58132_P1 (SEQ ID NO: 214) is encoded by the following transcript(s): T58132_T7 (SEQ ID NO: 189), for which the coding portion starts at position 1 and ends at position 444.

[1603] Variant protein T58132_P2 (SEQ ID NO: 215) according to the present invention has an amino acid sequence as given in the “Sequence Listing” of the application; it is encoded by transcript(s) T58132_T10 (SEQ ID NO: 191) and T58132_T9 (SEQ ID NO: 190).

[1604] The localization of the variant protein was determined according to results from a number of different software programs and analyses, including analyses from SignalP and other specialized programs. The variant protein is believed to be located intracellularly with regard to the cell.

[1605] Variant protein T58132_P2 (SEQ ID NO: 215) is encoded by the following transcript(s): T58132_T10 (SEQ ID NO: 191) and T58132_T9 (SEQ ID NO: 190), for which the sequence(s) is/are given in the “Sequence Listing” of the application.

[1606] The coding portion of transcript T58132_T10 (SEQ ID NO: 191) starts at position 637 and ends at position 957. The transcript also has the following SNPs as listed in Table 134 (given according to their position on the nucleotide sequence, with the alternative nucleic acid listed; T58132_P2 (SEQ ID NO: 215)).

TABLE 134
Nucleic acid SNPs

| | SNP position(s) on nucleotide |
|---|---|
| Polymorphism | sequence |
| T -> | 432 |
| C -> T | 460, 1878 |
| A -> G | 1067 |
| G -> A | 1547 |
| C -> A | 1739 |

[1607] The coding portion of transcript T58132_T9 (SEQ ID NO: 190) starts at position 1400 and ends at position 1720. The transcript also has the following SNPs as listed in Table 135 (given according to their position on the nucleotide sequence, with the alternative nucleic acid listed).

TABLE 135
Nucleic acid SNPs

| | SNP position(s) on nucleotide |
|---|---|
| Polymorphism | sequence |
| T -> | 1195 |
| C -> T | 1223, 2641 |
| A -> G | 1830 |
| G -> A | 2310 |
| C -> A | 2502 |

[1608] Variant protein T58132_P12 (SEQ ID NO: 216) according to the present invention has an amino acid sequence as given in the “Sequence Listing” of the application; it is encoded by transcript(s) T58132_T2 (SEQ ID NO: 187). An alignment is given to the known protein (LEM domain containing 1A, SEQ ID NOs:205-212, 425) in the alignment table, on the attached CDROM. One or more alignments to one or more previously published protein sequences are given in the alignment table, on the attached CDROM. A brief description of the relationship of the variant protein according to the present invention to each such aligned protein is as follows:

### 1. Comparison Report Between T58132_P12 (SEQ ID NO: 216) and Q6L9U4_HUMAN (SEQ ID NO:425):

[1609] A. An isolated chimeric polypeptide encoding for T58132_P12 (SEQ ID NO: 216), comprising a first amino acid sequence being at least about 90% homologous to MVDVKCLSDCKLQNQLEKLGFSPGPIL corresponding to amino acids 1-27 of Q6L9U4_HUMAN (SEQ ID NO:425), which also corresponds to amino acids 1-27 of T58132_P12 (SEQ ID NO: 216), a second bridging amino acid sequence comprising of Q, and a third amino acid sequence being at least about 90% homologous to LNIILQGNIILSTEKSKKLKKWPEASTTKRKAVDTYCLDYKPSKGRRWAARAPSTRITYGTITKERDYCAED QTIESWREEGFPVGLKLAVLGIFIIVVFVYLTVENKSLFG corresponding to amino acids 70-181 of Q6L9U4_HUMAN (SEQ ID NO:425), which also corresponds to amino acids 29-140 of T58132_P12 (SEQ ID NO: 216), wherein said first amino acid sequence, second amino acid sequence and third amino acid sequence are contiguous and in a sequential order.

[1610] B. An isolated polypeptide encoding for an edge portion of T58132_P12 (SEQ ID NO: 216), comprising a polypeptide having a length “n”, wherein n is at least about 10 amino acids in length, optionally at least about 20 amino acids in length, preferably at least about 30 amino acids in length, more preferably at least about 40 amino acids in length and most preferably at least about 50 amino acids in length, wherein at least 3 amino acids comprise LQL having a structure as follows (numbering according to T58132_P12 (SEQ ID NO: 216)): a sequence starting from any of amino acid numbers 27−x to 27; and ending at any of amino acid numbers 29+((n−3)−x), in which x varies from 0 to n-3.

### 2. Comparison Report Between T58132_P12 (SEQ ID NO: 216) and Q68G75_HUMAN (SEQ ID NO: 209):

[1611] A. An isolated chimeric polypeptide encoding for T58132_P12 (SEQ ID NO: 216), comprising a first amino acid sequence being at least about 90% homologous to MVDVKCLSDCKLQNQLEKLGFSPGPIL corresponding to amino acids 1-27 of Q68G75_HUMAN (SEQ ID NO: 209), which also corresponds to amino acids 1-27 of T58132_P12 (SEQ ID NO: 216), a second bridging amino acid sequence comprising of Q, a third amino acid sequence being at least about 90% homologous to LNIILQGNIILST corresponding to amino acids 70-82 of Q68G75_HUMAN (SEQ ID NO: 209), which also corresponds to amino acids 29-41 of T58132_P12 (SEQ ID NO: 216), a bridging amino acid E corresponding to amino acid 42 of T58132_P12 (SEQ ID NO: 216), and a fourth amino acid sequence being at least about 90% homologous to KSKKLKKWPEASTTKRKAVDTYCLDYKPSKGRRWAARAPSTRITYGTITKERDYCAEDQTIESWREEGFP VGLKLAVLGIFIIVVFVYLTVENKSLFG corresponding to amino acids 84-181 of Q68G75_HUMAN (SEQ ID NO: 209), which also corresponds to amino acids 43-140 of T58132_P12 (SEQ ID NO: 216), wherein said first amino acid sequence, second amino acid sequence, third amino acid sequence, bridging amino acid and fourth amino acid sequence are contiguous and in a sequential order.

[1612] The localization of the variant protein was determined according to results from a number of different software programs and analyses, including analyses from SignalP and other specialized programs. The variant protein is believed to be membranal.

[1613] Variant protein T58132_P12 (SEQ ID NO: 216) also has the following non-silent SNPs (Single Nucleotide Polymorphisms) as listed in Table 136, (given according to their position(s) on the amino acid sequence, with the alternative amino acid(s) listed).

TABLE 136
Amino acid mutations

| SNP position(s) on amino acid | |
|---|---|
| sequence | Alternative amino acid(s) |
| 58 | R -> C |

[1614] Variant protein T58132_P12 (SEQ ID NO: 216) is encoded by the following transcript(s): T58132_T2 (SEQ ID NO: 187), for which the sequence(s) is/are given in the “Sequence Listing” of the application. The coding portion of transcript T58132_T2 (SEQ ID NO: 187) starts at position 103 and ends at position 522. The transcript also has the following SNPs as listed in Table 137 (given according to their position on the nucleotide sequence, with the alternative nucleic acid listed).

TABLE 137
Nucleic acid SNPs

| | SNP position(s) on nucleotide |
|---|---|
| Polymorphism | sequence |
| C -> T | 274 |

[1615] Variant protein T58132_P13 (SEQ ID NO: 217) according to the present invention has an amino acid sequence as given in the “Sequence Listing” of the application; it is encoded by transcript(s) T58132_T11 (SEQ ID NO: 192) and T58132_T12 (SEQ ID NO: 193).

[1616] The localization of the variant protein was determined according to results from a number of different software programs and analyses, including analyses from SignalP and other specialized programs. The variant protein is believed to be located intracellularly with regard to the cell.

[1617] Variant protein T58132_P13 (SEQ ID NO: 217) also has the following non-silent SNPs (Single Nucleotide Polymorphisms) as listed in Table 138, (given according to their position(s) on the amino acid sequence, with the alternative amino acid(s) listed).

TABLE 138
Amino acid mutations

| SNP position(s) on amino acid | |
|---|---|
| sequence | Alternative amino acid(s) |
| 46 | S -> L |

[1618] Variant protein T58132_P13 (SEQ ID NO: 217) is encoded by the following transcript(s): T58132_T11 (SEQ ID NO: 192) and T58132_T12 (SEQ ID NO: 193), for which the coding portion starts at position 903 and ends at position 1133. The transcript also has the following SNPs as listed in Table 139 (given according to their position on the nucleotide sequence, with the alternative nucleic acid listed).

TABLE 139
Nucleic acid SNPs

| | SNP position(s) on nucleotide |
|---|---|
| Polymorphism | sequence |
| G -> A | 658 |
| C -> T | 1039 |

[1619] The coding portion of transcript T58132_T12 (SEQ ID NO: 193) starts at position 887 and ends at position 1117. The transcript also has the following SNPs as listed in Table 140 (given according to their position on the nucleotide sequence, with the alternative nucleic acid listed).

TABLE 140
Nucleic acid SNPs

| | SNP position(s) on nucleotide |
|---|---|
| Polymorphism | sequence |
| G -> A | 642 |
| C -> T | 1023 |

[1620] As noted above, cluster T58132 features 11 segment(s), which were listed in Table 130 above and for which the sequence(s) are given in the “Sequence Listing” of the application. These segment(s) are portions of nucleic acid sequence(s) which are described herein separately because they are of particular interest. A description of some of these segments according to the present invention is now provided.

[1621] Segment cluster T58132_N6 (SEQ ID NO: 194) according to the present invention is supported by 3 libraries. The number of libraries was determined as previously described. This segment can be found in the following transcript(s): T58132_T11 (SEQ ID NO: 192) and T58132_T12 (SEQ ID NO: 193). Table 141 below describes the starting and ending position of this segment on each transcript.

TABLE 141
Segment location on transcripts

| | Segment | Segment |
|---|---|---|
| Transcript name | starting position | ending position |
| T58132_T11 (SEQ ID NO: 192) | 83 | 1225 |
| T58132_T12 (SEQ ID NO: 193) | 67 | 1209 |

[1622] Segment cluster T58132_N8 (SEQ ID NO: 195) according to the present invention is supported by 6 libraries. The number of libraries was determined as previously described. This segment can be found in the following transcript(s): T58132 T9 (SEQ ID NO: 190). Table 142 below describes the starting and ending position of this segment on each transcript.

TABLE 142
Segment location on transcripts

| | Segment | Segment |
|---|---|---|
| Transcript name | starting position | ending position |
| T58132_T9 (SEQ ID NO: 190) | 1 | 845 |

[1623] Segment cluster T58132_N9 (SEQ ID NO: 196) according to the present invention is supported by 21 libraries. The number of libraries was determined as previously described. This segment can be found in the following transcript(s): T58132_T10 (SEQ ID NO: 191) and T58132_T9 (SEQ ID NO: 190). Table 143 below describes the starting and ending position of this segment on each transcript.

TABLE 143
Segment location on transcripts

| | Segment | Segment |
|---|---|---|
| Transcript name | starting position | ending position |
| T58132_T10 (SEQ ID NO: 191) | 83 | 2411 |
| T58132_T9 (SEQ ID NO: 190) | 846 | 3174 |

[1624] Segment cluster T58132_N13 (SEQ ID NO: 197) according to the present invention is supported by 17 libraries. The number of libraries was determined as previously described. This segment can be found in the following transcript(s): T58132_T2 (SEQ ID NO: 187), T58132_T4 (SEQ ID NO: 188) and T58132_T7 (SEQ ID NO: 189). Table 144 below describes the starting and ending position of this segment on each transcript.

TABLE 144
Segment location on transcripts

| | Segment | Segment |
|---|---|---|
| Transcript name | starting position | ending position |
| T58132_T2 (SEQ ID NO: 187) | 65 | 184 |
| T58132_T4 (SEQ ID NO: 188) | 83 | 202 |
| T58132_T7 (SEQ ID NO: 189) | 83 | 202 |

[1625] Segment cluster T58132_N15 (SEQ ID NO: 198) according to the present invention is supported by 7 libraries. The number of libraries was determined as previously described. This segment can be found in the following transcript(s): T58132_T4 (SEQ ID NO: 188) and T58132_T7 (SEQ ID NO: 189). Table 145 below describes the starting and ending position of this segment on each transcript.

TABLE 145
Segment location on transcripts

| | Segment | Segment |
|---|---|---|
| Transcript name | starting position | ending position |
| T58132_T4 (SEQ ID NO: 188) | 203 | 325 |
| T58132_T7 (SEQ ID NO: 189) | 203 | 325 |

[1626] Segment cluster T58132_N21 (SEQ ID NO: 199) according to the present invention is supported by 28 libraries. The number of libraries was determined as previously described. This segment can be found in the following transcript(s): T58132_T2 (SEQ ID NO: 187), T58132_T4 (SEQ ID NO: 188) and T58132_T7 (SEQ ID NO: 189). Table 146 below describes the starting and ending position of this segment on each transcript.

TABLE 146
Segment location on transcripts

| | Segment | Segment |
|---|---|---|
| Transcript name | starting position | ending position |
| T58132_T2 (SEQ ID NO: 187) | 327 | 805 |
| T58132_T4 (SEQ ID NO: 188) | 468 | 946 |
| T58132_T7 (SEQ ID NO: 189) | 326 | 804 |

[1627] According to an optional embodiment of the present invention, short segments related to the above cluster are also provided. These segments are up to about 120 bp in length, and so are included in a separate description.

[1628] Segment cluster T58132_N2 (SEQ ID NO: 200) according to the present invention is supported by 4 libraries. The number of libraries was determined as previously described. This segment can be found in the following transcript(s): T58132_T10 (SEQ ID NO: 191), T58132_T11 (SEQ ID NO: 192), T58132 T4 (SEQ ID NO: 188) and T58132_T7 (SEQ ID NO: 189). Table 147 below describes the starting and ending position of this segment on each transcript.

TABLE 147
Segment location on transcripts

| | Segment | Segment |
|---|---|---|
| Transcript name | starting position | ending position |
| T58132_T10 (SEQ ID NO: 191) | 1 | 82 |
| T58132_T11 (SEQ ID NO: 192) | 1 | 82 |
| T58132_T4 (SEQ ID NO: 188) | 1 | 82 |
| T58132_T7 (SEQ ID NO: 189) | 1 | 82 |

[1629] Segment cluster T58132_N4 (SEQ ID NO: 201) according to the present invention is supported by 1 libraries. The number of libraries was determined as previously described. This segment can be found in the following transcript(s): T58132_T12 (SEQ ID NO: 193). Table 148 below describes the starting and ending position of this segment on each transcript.

TABLE 148
Segment location on transcripts

| | Segment | Segment |
|---|---|---|
| Transcript name | starting position | ending position |
| T58132_T12 (SEQ ID NO: 193) | 1 | 66 |

[1630] Segment cluster T58132_N17 (SEQ ID NO: 203) according to the present invention is supported by 4 libraries. The number of libraries was determined as previously described. This segment can be found in the following transcript(s): T58132_T2 (SEQ ID NO: 187) and T58132_T4 (SEQ ID NO: 188). Table 149 below describes the starting and ending position of this segment on each transcript.

TABLE 149
Segment location on transcripts

| | Segment | Segment |
|---|---|---|
| Transcript name | starting position | ending position |
| T58132_T2 (SEQ ID NO: 187) | 185 | 249 |
| T58132_T4 (SEQ ID NO: 188) | 326 | 390 |

[1631] Expression of Homo sapiens LEM domain containing 1 (LEMD1) transcripts detectable by or according to segments as described below was measured by real time PCR: seg6F2R—T58132_seg6F2R2 (SEQ ID NO: 273) amplicon and primers T58132_seg6F2 (SEQ ID NO: 271) and T58132_seg6R2 (SEQ ID NO: 272); seg8F2R2—T58132_seg8F2R2 (SEQ ID NO: 276) amplicon and primers T58132_seg8F2 (SEQ ID NO: 274) and T58132_seg8R2 (SEQ ID NO: 275); seg21—T58132_seg21 (SEQ ID NO: 279) amplicon and primers T58132_seg21F (SEQ ID NO: 277) and T58132_seg21R (SEQ ID NO: 278).

[1632] The sequences of the corresponding amplicons and primers are given below:

Forward Primer (T58132_seg6F2 (SEQ ID) NO: 271)):
CCCCAGTTCACTTTCGCCT
Reverse Primer (T58132_seg6R2 (SEQ ID NO: 272)):
TCTGATCACACCGCCGTCT
Amplicon (T58132_seg6F2R2 (SEQ ID NO: 273)):
CCCCAGTTCACTTTCGCCTGCTTCTGTGGTCTGCACGGCTTCTGCAAAAT
GAAGAGGAAGAAGGAGGAAGTTCACAGAGAGCGGGAGACGGCGGTGTGAT
CAGA
Forward Primer (T58132_seg8F2 (SEQ ID NO: 274)):
CCCAGAGCTTCTGCTAGAATCTTC
Reverse Primer (T58132_seg8R2 (SEQ ID NO: 275)):
ACTGACTTACTCCCCTTGGGC
Amplicon (T58132_seg8F2R2 (SEQ ID NO: 276)):
CCCAGAGCTTCTGCTAGAATCTTCCCCTAGCCAGGGCCCAGGACTCCTTG
CAGTTCTGCCTCTCTTCCCTCCTACAGCCAGGCCCAAGGGGAGTAAGTCA
GT
Forward Primer (T58132_seg21F (SEQ ID NO: 277)):
GAGCACCAAGCACCAGAATCA
Reverse Primer (T58132_seg21R (SEQ ID NO: 278)):
TGGGAAACCTTCTTCTCTCCAG
Amplicon (T58132_seg21 (SEQ ID NO: 279)):
AGCACCAAGCACCAGAATCACATATGGGACTATCACCAAAGAGAGAGACT
ACTGCGCGGAAGACCAGACTATCGAGAGCTGGAGAGAAGAAGGTTTCCCA

[1633] Expression of Homo sapiens LEM Domain Containing 1 (LEMD1) T58132 Transcripts which are Detectable by Amplicon as Depicted in Sequence Name T58132_seg6F2R2 (SEQ ID NO: 273) in Normal and Cancerous Colon Tissues.

[1634] Expression of Homo sapiens LEM domain containing 1 (LEMD1) transcripts detectable by or according to seg6F2R2—T58132_seg6F2R2 (SEQ ID NO: 273) amplicon and primers T58132_seg6F2 (SEQ ID NO: 271) and T58132_seg6R2 (SEQ ID NO: 272) was measured by real time PCR. In parallel the expression of four housekeeping genes—HPRT1 (GenBank Accession No. NM_{—}000194 (SEQ ID NO:337); amplicon—HPRT1-amplicon (SEQ ID NO: 305) (SEQ ID NO: 305)), PBGD (GenBank Accession No. BC019323 (SEQ ID NO:336); amplicon—PBGD-amplicon (SEQ ID NO: 302)), RPS27a (GenBank Accession No. NM_{—}002954 (SEQ ID NO: 340); RPS27A amplicon) and G6PD (GenBank Accession No. NM_{—}000402 (SEQ ID NO:339); G6PD amplicon (SEQ ID NO: 311)) was measured similarly. For each RT sample, the expression of the above amplicon was normalized to the geometric mean of the quantities of the housekeeping genes. The normalized quantity of each RT sample was then divided by the median of the quantities of the normal post-mortem (PM) samples (sample numbers 41, 52, 62, 63, 64, 65, 66, 67, 69 and 71, Table 1_{—}4 above: “Tissue samples in colon cancer testing panel”), to obtain a value of fold up-regulation for each sample relative to the median of the normal PM samples.

[1635] FIG. 66A is a histogram showing over expression of the Homo sapiens LEM domain containing 1 (LEMD1) transcripts in cancerous Colon samples relative to the normal samples.

[1636] As is evident from FIG. 66A, the expression of Homo sapiens LEM domain containing 1 (LEMD1) transcripts detectable by the above amplicon in cancer samples was significantly higher than in the non-cancerous samples (sample numbers 41, 52, 62, 63, 64, 65, 66, 67, 69 and 71, Table 1_{—}4 above: “Tissue samples in colon cancer testing panel”). Notably an over-expression of at least 5 fold was found in 29 out of 36 adenocarcinoma samples.

[1637] Statistical analysis was applied to verify the significance of these results, as described below.

[1638] The P value for the difference in the expression levels of Homo sapiens LEM domain containing 1 (LEMD1) transcripts detectable by the above amplicon in Colon cancer samples versus the normal tissue samples was determined by T test as 2.51e-007.

[1639] Threshold of 5 fold over expression was found to differentiate between cancer and normal samples with P value of 4.77e-006 as checked by exact Fisher test.

[1640] The above values demonstrate statistical significance of the results.

[1641] Primer pairs are also optionally and preferably encompassed within the present invention; for example, for the above experiment, the following primer pair was used as a non-limiting illustrative example only of a suitable primer pair: T58132_seg6F2 (SEQ ID NO: 271) forward primer; and T58132_seg6R2 (SEQ ID NO: 272) reverse primer.

[1642] The present invention also preferably encompasses any amplicon obtained through the use of any suitable primer pair; for example, for the above experiment, the following amplicon was obtained as a non-limiting illustrative example only of a suitable amplicon: T58132_seg6F2R2 (SEQ ID NO: 273).

[1643] Expression of Homo sapiens LEM domain containing 1 (LEMD1) transcripts detectable by or according to seg6F2R2—T58132_seg6F2R2 (SEQ ID NO: 273) amplicon and primers T58132_seg6F2 (SEQ ID NO: 271) and T58132_seg6R2 (SEQ ID NO: 272) was further measured by real time PCR using enlarged panel as shown in Table 1_{—}8. In parallel the expression of four housekeeping genes—HPRT1 (GenBank Accession No. NM_{—}000194 (SEQ ID NO:337); amplicon—HPRT1-amplicon (SEQ ID NO: 305) (SEQ ID NO: 305)), PBGD (GenBank Accession No. BC019323 (SEQ ID NO:336); amplicon—PBGD-amplicon (SEQ ID NO: 302)), and G6PD (GenBank Accession No. NM_{—}000402 (SEQ ID NO:339); G6PD amplicon (SEQ ID NO: 311)) was measured similarly. For each RT sample, the expression of the above amplicon was normalized to the normalization factor calculated from the expression of these house keeping genes as described in normalization method 2 in the “materials and methods” section. The normalized quantity of each RT sample was then divided by the median of the quantities of the normal samples (sample numbers 42, 43, 44, 45, 46, 47, 48, 49, 50, 51, 52, 53, 54, 55, 56, 57, 58, 59, 60, 61, 62, 63, 64, 65, 66, 67, 68, 69 and 70, Table 1_{—}8 above), to obtain a value of fold up-regulation for each sample relative to the median of the normal samples.

[1644] FIG. 66B is a histogram showing over expression of the Homo sapiens LEM domain containing 1 (LEMD1) transcripts in cancerous Colon samples relative to the normal samples.

[1645] As is evident from FIG. 66B, the expression of Homo sapiens LEM domain containing 1 (LEMD1) transcripts detectable by the above amplicon in cancer samples was significantly higher than in the normal samples (sample numbers 42, 43, 44, 45, 46, 47, 48, 49, 50, 51, 52, 53, 54, 55, 56, 57, 58, 59, 60, 61, 62, 63, 64, 65, 66, 67, 68, 69 and 70, Table 1_{—}8 above). Notably an over-expression of at least 5 fold was found in 40 out of 55 adenocarcinoma samples.

[1646] Statistical analysis was applied to verify the significance of these results, as described below.

[1647] The P value for the difference in the expression levels of Homo sapiens LEM domain containing 1 (LEMD1) transcripts detectable by the above amplicon in Colon cancer samples versus the normal tissue samples was determined by T test as 1.81 e-08 Threshold of 5 fold over expression was found to differentiate between cancer and normal samples with P value of 7.79e-12 as checked by exact Fisher test.

[1648] The above values demonstrate statistical significance of the results.

[1649] Primer pairs are also optionally and preferably encompassed within the present invention; for example, for the above experiment, the following primer pair was used as a non-limiting illustrative example only of a suitable primer pair: T58132_seg6F2 (SEQ ID NO: 271) forward primer; and T58132_seg6R2 (SEQ ID NO: 272) reverse primer.

[1650] The present invention also preferably encompasses any amplicon obtained through the use of any suitable primer pair; for example, for the above experiment, the following amplicon was obtained as a non-limiting illustrative example only of a suitable amplicon: T58132_seg6F2R2 (SEQ ID NO: 273).

Expression of Homo sapiens LEM Domain Containing 1 (LEMD1) T58132 Transcripts which are Detectable by Amplicon as Depicted in Sequence Name T58132_seg6F2R2 (SEQ ID NO: 273) in Different Normal Tissues.

[1651] Expression of Homo sapiens LEM domain containing 1 (LEMD1) transcripts detectable by or according to seg6F2R2—T58132_seg6F2R2 (SEQ ID NO: 273) amplicon and primers T58132_seg6F2 (SEQ ID NO: 271) and T58132_seg6R2 (SEQ ID NO: 272) was measured by real time PCR. In parallel the expression of four housekeeping genes—SDHA (GenBank Accession No. NM_{—}004168 (SEQ ID NO:335); amplicon—SDHA-amplicon (SEQ ID NO:299)), Ubiquitin (GenBank Accession No. BC000449 (SEQ ID NO:341); amplicon—Ubiquitin-amplicon (SEQ ID NO: 317)), RPL19 (GenBank Accession No. NM_{—}000981 (SEQ ID NO:342); RPL19 amplicon (SEQ ID NO: 320)) and TATA box (GenBank Accession No. NM_{—}003194 (SEQ ID NO:343); TATA amplicon (SEQ ID NO: 323)) was measured similarly. For each RT sample, the expression of the above amplicon was normalized to the geometric mean of the quantities of the housekeeping genes. The normalized quantity of each RT sample was then divided by the median of the quantities of the colon samples (sample numbers 1, 2 and 3, Table 1_{—}9 above: “Tissue samples in normal panel”), to obtain a value of relative expression of each sample relative to the median of the colon samples.

[1652] FIG. 67A is a histogram showing expression of Homo sapiens LEM domain containing 1 (LEMD1) T58132 transcripts which are detectable by amplicon as depicted in sequence name T58132_seg6F2R2 (SEQ ID NO: 273) in different normal tissues.

[1653] Expression of Homo sapiens LEM domain containing 1 (LEMD1) transcripts detectable by or according to seg6F2R2—T58132_seg6F2R2 (SEQ ID NO: 273) amplicon and primers T58132_seg6F2 (SEQ ID NO: 271) and T58132_seg6R2 (SEQ ID NO: 272) was further measured by real time PCR using updated panel as shown in Table 1_{—}10. In parallel the expression of four housekeeping genes—SDHA (GenBank Accession No. NM_{—}004168 (SEQ ID NO:335); amplicon—SDHA-amplicon (SEQ ID NO:299)), Ubiquitin (GenBank Accession No. BC000449 (SEQ ID NO:341); amplicon—Ubiquitin-amplicon (SEQ ID NO: 317)), and TATA box (GenBank Accession No. NM_{—}003194 (SEQ ID NO:343); TATA amplicon (SEQ ID NO: 323)) was measured similarly. For each RT sample, the expression of the above amplicon was normalized to the normalization factor calculated from the expression of these house keeping genes as described in normalization method 2 in the “materials and methods” section. The normalized quantity of each RT sample was then divided by the median of the quantities of the ovary samples (sample numbers 31, 32, 33 and 34, Table 1_{—}9 above), to obtain a value of relative expression of each sample relative to the median of the ovary samples as presented in FIG. 67B. The normalized quantity of each RT sample was also divided by the median of the quantities of the colon samples (sample numbers 3, 4, 5, Table 1_{—}4 above), to obtain a value of relative expression of each sample relative to the median of the colon samples as presented in FIG. 67C.

[1654] Expression of Homo sapiens LEM Domain Containing 1 (LEMD1) T58132 Transcripts which are Detectable by Amplicon as Depicted in Sequence Name T58132_seg8F2R (SEQ ID NO: 276) in Normal and Cancerous Colon Tissues.

[1655] Expression of Homo sapiens LEM domain containing 1 (LEMD1) transcripts detectable by or according to seg8F2R2—T58132_seg8F2R2 (SEQ ID NO: 276) amplicon and primers T58132_seg8F2 (SEQ ID NO: 274) and T58132_seg8R2 (SEQ ID NO: 275) was measured by real time PCR. In parallel the expression of four housekeeping genes—HPRT1 (GenBank Accession No. NM_{—}000194 (SEQ ID NO:337); amplicon—HPRT1-amplicon (SEQ ID NO: 305) (SEQ ID NO: 305)), PBGD (GenBank Accession No. BC019323 (SEQ ID NO:336); amplicon—PBGD-amplicon (SEQ ID NO: 302)), RPS27a (GenBank Accession No. NM_{—}002954 (SEQ ID NO: 340); RPS27A amplicon) and G6PD (GenBank Accession No. NM_{—}000402 (SEQ ID NO:339); G6PD amplicon (SEQ ID NO: 311)) was measured similarly. For each RT sample, the expression of the above amplicon was normalized to the geometric mean of the quantities of the housekeeping genes. The normalized quantity of each RT sample was then divided by the median of the quantities of the normal post-mortem (PM) samples (sample numbers 41, 52, 62, 63, 64, 65, 66, 67, 69 and 71, Table 1_{—}4 above, “Tissue samples in colon cancer testing panel”), to obtain a value of fold up-regulation for each sample relative to the median of the normal PM samples.

[1656] FIG. 68A is a histogram showing over expression of the Homo sapiens LEM domain containing 1 (LEMD1) transcripts in cancerous Colon samples relative to the normal samples.

[1657] As is evident from FIG. 68A, the expression of Homo sapiens LEM domain containing 1 (LEMD1) transcripts detectable by the above amplicon in cancer samples was significantly higher than in the non-cancerous samples (sample numbers 41, 52, 62, 63, 64, 65, 66, 67, 69 and 71, Table 1_{—}4 above: “Tissue samples in colon cancer testing panel”). Notably an over-expression of at least 5 fold was found in 29 out of 36 adenocarcinoma samples.

[1658] Statistical analysis was applied to verify the significance of these results, as described below.

[1659] The P value for the difference in the expression levels of Homo sapiens LEM domain containing 1 (LEMD1) transcripts detectable by the above amplicon in Colon cancer samples versus the normal tissue samples was determined by T test as 9.17e-007.

[1660] Threshold of 5 fold over expression was found to differentiate between cancer and normal samples with P value of 4.77e-006 as checked by exact Fisher test.

[1661] The above values demonstrate statistical significance of the results.

[1662] Primer pairs are also optionally and preferably encompassed within the present invention; for example, for the above experiment, the following primer pair was used as a non-limiting illustrative example only of a suitable primer pair: T58132_seg8F2 (SEQ ID NO: 274) forward primer; and T58132_seg8R2 (SEQ ID NO: 275) reverse primer.

[1663] The present invention also preferably encompasses any amplicon obtained through the use of any suitable primer pair; for example, for the above experiment, the following amplicon was obtained as a non-limiting illustrative example only of a suitable amplicon: T58132_seg8F2R2 (SEQ ID NO: 276).

[1664] Expression of Homo sapiens LEM domain containing 1 (LEMD1) transcripts detectable by or according to seg8F2R2—T58132_seg8F2R2 (SEQ ID NO: 276) amplicon and primers T58132_seg8F2 (SEQ ID NO: 274) and T58132_seg8R2 (SEQ ID NO: 275) was further measured by real time PCR using enlarged panel as shown in Table 1_{—}8. In parallel the expression of four housekeeping genes—HPRT1 (GenBank Accession No. NM_{—}000194 (SEQ ID NO:337); amplicon—HPRT1-amplicon (SEQ ID NO: 305) (SEQ ID NO: 305)), PBGD (GenBank Accession No. BC019323 (SEQ ID NO:336); amplicon—PBGD-amplicon (SEQ ID NO: 302)), and G6PD (GenBank Accession No. NM_{—}000402 (SEQ ID NO:339); G6PD amplicon (SEQ ID NO: 311)) was measured similarly. For each RT sample, the expression of the above amplicon was normalized to the normalization factor calculated from the expression of these house keeping genes as described in normalization method 2 in the “materials and methods” section. The normalized quantity of each RT sample was then divided by the median of the quantities of the normal samples (sample numbers 52, 42, 43, 44, 45, 46, 47, 48, 49, 50, 51, 53, 54, 55, 56, 57, 58, 59, 60, 61, 62, 63, 64, 65, 66, 67, 68, 69 and 70, Table 1_{—}8 above), to obtain a value of fold up-regulation for each sample relative to the median of the normal samples.

[1665] FIG. 68B is a histogram showing over expression of the Homo sapiens LEM domain containing 1 (LEMD1) transcripts in cancerous Colon samples relative to the normal samples.

[1666] As is evident from FIG. 68B, the expression of Homo sapiens LEM domain containing 1 (LEMD1) transcripts detectable by the above amplicon in cancer samples was significantly higher than in the non-cancerous samples (sample numbers 52, 42, 43, 44, 45, 46, 47, 48, 49, 50, 51, 53, 54, 55, 56, 57, 58, 59, 60, 61, 62, 63, 64, 65, 66, 67, 68, 69 and 70, Table 1_{—}8 above). Notably an over-expression of at least 5 fold was found in 43 out of 55 adenocarcinoma samples.

[1667] Statistical analysis was applied to verify the significance of these results, as described below.

[1668] The P value for the difference in the expression levels of Homo sapiens LEM domain containing 1 (LEMD1) transcripts detectable by the above amplicon in Colon cancer samples versus the normal tissue samples was determined by T test as 2.73e-07 Threshold of 5 fold over expression was found to differentiate between cancer and normal samples with P value of 2.68e-13 as checked by exact Fisher test.

[1669] The above values demonstrate statistical significance of the results.

[1670] Primer pairs are also optionally and preferably encompassed within the present invention; for example, for the above experiment, the following primer pair was used as a non-limiting illustrative example only of a suitable primer pair: T58132_seg8F2 (SEQ ID NO: 274) forward primer; and T58132_seg8R2 (SEQ ID NO: 275) reverse primer.

[1671] The present invention also preferably encompasses any amplicon obtained through the use of any suitable primer pair; for example, for the above experiment, the following amplicon was obtained as a non-limiting illustrative example only of a suitable amplicon: T58132_seg8F2R2 (SEQ ID NO: 276).

[1672] Expression of Homo sapiens LEM Domain Containing 1 (LEMD1) T58132 Transcripts which are Detectable by Amplicon as Depicted in Sequence Name T58132_seg21 (SEQ ID NO: 279) in Normal and Cancerous Colon Tissues.

[1673] Expression of Homo sapiens LEM domain containing 1 (LEMD1) transcripts detectable by or according to seg21_T58132_seg21 (SEQ ID NO: 279) amplicon and primers T58132_seg21F (SEQ ID NO: 277) and T58132_seg21R (SEQ ID NO: 278) was measured by real time PCR. In parallel the expression of four housekeeping genes—HPRT1 (GenBank Accession No. NM_{—}000194 (SEQ ID NO:337); amplicon—HPRT1-amplicon (SEQ ID NO: 305) (SEQ ID NO: 305)), PBGD (GenBank Accession No. BC019323 (SEQ ID NO:336); amplicon—PBGD-amplicon (SEQ ID NO: 302)), RPS27a (GenBank Accession No. NM_{—}002954 (SEQ ID NO: 340); RPS27A amplicon) and G6PD (GenBank Accession No. NM_{—}000402 (SEQ ID NO:339); G6PD amplicon (SEQ ID NO: 311)) was measured similarly. For each RT sample, the expression of the above amplicon was normalized to the geometric mean of the quantities of the housekeeping genes. The normalized quantity of each RT sample was then divided by the median of the quantities of the normal post-mortem (PM) samples (sample numbers 41, 63, 64, 65, 66, 69 and 71, Table 1_{—}4 above: “Tissue samples in colon cancer testing panel”), to obtain a value of fold up-regulation for each sample relative to the median of the normal PM samples.

[1674] FIG. 69A is a histogram showing over expression of the Homo sapiens LEM domain containing 1 (LEMD1) transcripts in cancerous Colon samples relative to the normal samples.

[1675] As is evident from FIG. 69A, the expression of Homo sapiens LEM domain containing 1 (LEMD1) transcripts detectable by the above amplicon in cancer samples was significantly higher than in the non-cancerous samples (sample numbers 41, 63, 64, 65, 66, 69 and 71, Table 1_{—}4 above: “Tissue samples in colon cancer testing panel”). Notably an over-expression of at least 5 fold was found in 26 out of 36 adenocarcinoma samples.

[1676] Statistical analysis was applied to verify the significance of these results, as described below.

[1677] The P value for the difference in the expression levels of Homo sapiens LEM domain containing 1 (LEMD1) transcripts detectable by the above amplicon in Colon cancer samples versus the normal tissue samples was determined by T test as 8.52e-003.

[1678] Threshold of 5 fold over expression was found to differentiate between cancer and normal samples with P value of 6.04e-004 as checked by exact Fisher test.

[1679] The above values demonstrate statistical significance of the results.

[1680] Primer pairs are also optionally and preferably encompassed within the present invention; for example, for the above experiment, the following primer pair was used as a non-limiting illustrative example only of a suitable primer pair: T58132_seg21F (SEQ ID NO: 277) forward primer; and T58132_seg21R (SEQ ID NO: 278) reverse primer.

[1681] The present invention also preferably encompasses any amplicon obtained through the use of any suitable primer pair; for example, for the above experiment, the following amplicon was obtained as a non-limiting illustrative example only of a suitable amplicon: T58132_seg21 (SEQ ID NO: 279).

[1682] Expression of Homo sapiens LEM domain containing 1 (LEMD1) transcripts detectable by or according to seg21WT—T58132_seg21WT (SEQ ID NO: 279) amplicon and primers T58132_seg21WTF (SEQ ID NO: 277) and T58132_seg21WTR (SEQ ID NO: 278) was further measured by real time PCR using enlarged panel as shown in Table 1_{—}8. In parallel the expression of four housekeeping genes—HPRT1 (GenBank Accession No. NM_{—}000194 (SEQ ID NO:337); amplicon—HPRT1-amplicon (SEQ ID NO: 305) (SEQ ID NO: 305)), PBGD (GenBank Accession No. BC019323 (SEQ ID NO:336); amplicon—PBGD-amplicon (SEQ ID NO: 302)), and G6PD (GenBank Accession No. NM_{—}000402 (SEQ ID NO:339); G6PD amplicon (SEQ ID NO: 311)) was measured similarly. For each RT sample, the expression of the above amplicon was normalized to the normalization factor calculated from the expression of these house keeping genes as described in normalization method 2 in the “materials and methods” section. The normalized quantity of each RT sample was then divided by the median of the quantities of the normal samples (sample numbers 52, 42, 43, 44, 45, 46, 47, 48, 49, 50, 51, 53, 54, 55, 56, 57, 58, 59, 60, 61, 62, 63, 64, 65, 66, 67, 68, 69 and 70, Table 1_{—}8 above), to obtain a value of fold up-regulation for each sample relative to the median of the normal samples.

[1683] FIG. 69B is a histogram showing over expression of the Homo sapiens LEM domain containing 1 (LEMD1) transcripts in cancerous Colon samples relative to the normal samples.

[1684] As is evident from FIG. 69B, the expression of Homo sapiens LEM domain containing 1 (LEMD1) transcripts detectable by the above amplicon in cancer samples was significantly higher than in the non-cancerous samples (sample numbers 52, 42, 43, 44, 45, 46, 47, 48, 49, 50, 51, 53, 54, 55, 56, 57, 58, 59, 60, 61, 62, 63, 64, 65, 66, 67, 68, 69 and 70, Table 1_{—}8 above). Notably an over-expression of at least 5 fold was found in 38 out of 55 adenocarcinoma samples.

[1685] Statistical analysis was applied to verify the significance of these results, as described below.

[1686] The P value for the difference in the expression levels of Homo sapiens LEM domain containing 1 (LEMD1) transcripts detectable by the above amplicon in Colon cancer samples versus the normal tissue samples was determined by T test as 1.20e-02.

[1687] Threshold of 5 fold over expression was found to differentiate between cancer and normal samples with P value of 1.48e-09 as checked by exact Fisher test.

[1688] The above values demonstrate statistical significance of the results.

[1689] Primer pairs are also optionally and preferably encompassed within the present invention; for example, for the above experiment, the following primer pair was used as a non-limiting illustrative example only of a suitable primer pair: T58132_seg21WTF (SEQ ID NO: 277) forward primer; and T58132_seg21WTR (SEQ ID NO: 278) reverse primer.

[1690] The present invention also preferably encompasses any amplicon obtained through the use of any suitable primer pair; for example, for the above experiment, the following amplicon was obtained as a non-limiting illustrative example only of a suitable amplicon: T58132_seg21WT (SEQ ID NO: 279).

[1691] Expression of Homo sapiens LEM Domain Containing 1 (LEMD1) T58132 Transcripts which are Detectable by Amplicon as Depicted in Sequence Name T58132_seg6F2R2 (SEQ ID NO: 273) in Normal and Cancerous Lung Tissues

[1692] Expression of Homo sapiens LEM domain containing 1 (LEMD1) transcripts detectable by or according to seg6F2R2—T58132_seg6F2R2 (SEQ ID NO: 273) amplicon and primers T58132_seg6F2 (SEQ ID NO: 271) and T58132_seg6R2 (SEQ ID NO: 272) was measured by real time PCR. In parallel the expression of four housekeeping genes—HPRT1 (GenBank Accession No. NM_{—}000194 (SEQ ID NO:337); amplicon—HPRT1-amplicon (SEQ ID NO: 305) (SEQ ID NO: 305)), PBGD (GenBank Accession No. BC019323 (SEQ ID NO:336); amplicon—PBGD-amplicon (SEQ ID NO: 302)), SDHA (GenBank Accession No. NM_{—}004168 (SEQ ID NO:335); amplicon—SDHA-amplicon (SEQ ID NO:299)) and Ubiquitin (GenBank Accession No. BC000449 (SEQ ID NO:341); amplicon—Ubiquitin-amplicon (SEQ ID NO: 317)) was measured similarly. For each RT sample, the expression of the above amplicon was normalized to the geometric mean of the quantities of the housekeeping genes. The normalized quantity of each RT sample was then divided by the median of the quantities of the normal post-mortem (PM) samples (sample numbers 47, 48, 49, 50, 90, 91, 92, 93, 96, 97, 98 and 99, Table 1_{—}2 above), to obtain a value of fold up-regulation for each sample relative to the median of the normal PM samples.

[1693] FIG. 70A is a histogram showing over expression of the Homo sapiens LEM domain containing 1 (LEMD1) transcripts in cancerous Lung samples relative to the normal samples.

[1694] As is evident from FIG. 70A, the expression of Homo sapiens LEM domain containing 1 (LEMD1) transcripts detectable by the above amplicon in non-small cell carcinoma samples, specifically, adenocarcinoma and squamous cell carcinoma, was significantly higher than in the non-cancerous samples (sample numbers 47, 48, 49, 50, 90, 91, 92, 93, 96, 97, 98 and 99, Table 1_{—}2 above). Notably an over-expression of at least 5 fold was found in 21 out of 35 non-small cell carcinoma samples, specifically—13 out of 15 adenocarcinoma samples and in 7 out of 16 squamous cell carcinoma samples.

[1695] Statistical analysis was applied to verify the significance of these results, as described below.

[1696] The P value for the difference in the expression levels of Homo sapiens LEM domain containing 1 (LEMD1) transcripts detectable by the above amplicon in Lung adenocarcinoma samples versus the normal tissue samples was determined by T test as 1.36e-003. The P value for the difference in the expression levels of Homo sapiens LEM domain containing 1 (LEMD1) transcripts detectable by the above amplicon in Lung squamous cell carcinoma samples versus the normal tissue samples was determined by T test as 4.68e-002. The P value for the difference in the expression levels of Homo sapiens LEM domain containing 1 (LEMD1) transcripts detectable by the above amplicon in Lung non-small cell carcinoma samples versus the normal tissue samples was determined by T test as 2.28e-004.

[1697] Threshold of 5 fold over expression was found to differentiate between adenocarcinoma and normal samples with P value of 5.23e-006 as checked by exact Fisher test. Threshold of 5 fold over expression was found to differentiate between squamous cell carcinoma and normal samples with P value of 9.66e-003 as checked by exact Fisher test. Threshold of 5 fold over expression was found to differentiate between non-small cell carcinoma and normal samples with P value of 1.85e-004 as checked by exact Fisher test.

[1698] The above values demonstrate statistical significance of the results.

[1699] Primer pairs are also optionally and preferably encompassed within the present invention; for example, for the above experiment, the following primer pair was used as a non-limiting illustrative example only of a suitable primer pair: T58132_seg6F2 (SEQ ID NO: 271) forward primer; and T58132_seg6R2 (SEQ ID NO: 272) reverse primer.

[1700] The present invention also preferably encompasses any amplicon obtained through the use of any suitable primer pair; for example, for the above experiment, the following amplicon was obtained as a non-limiting illustrative example only of a suitable amplicon: T58132_seg6F2R2 (SEQ ID NO: 273).

[1701] Expression of LEM domain containing 1 (LEMD1) transcripts detectable by or according to seg6F2R2-T58132_seg6F2R2 (SEQ ID NO: 273) amplicon and primers T58132_seg6F2 (SEQ ID NO: 271) and T58132_seg6R2 (SEQ ID NO: 272) was further measured by real time PCR using enlarged panel as shown in Table 1_{—}6. In parallel the expression of four housekeeping genes—HPRT1 (GenBank Accession No. NM_{—}000194 (SEQ ID NO:337); amplicon—HPRT1-amplicon (SEQ ID NO: 305) (SEQ ID NO: 305)), PBGD (GenBank Accession No. BC019323 (SEQ ID NO:336); amplicon—PBGD-amplicon (SEQ ID NO: 302)), SDHA (GenBank Accession No. NM_{—}004168 (SEQ ID NO:335); amplicon—SDHA-amplicon (SEQ ID NO:299)) and Ubiquitin (GenBank Accession No. BC000449 (SEQ ID NO:341); amplicon—Ubiquitin-amplicon (SEQ ID NO: 317)) was measured similarly. For each RT sample, the expression of the above amplicon was normalized to the normalization factor calculated from the expression of these house keeping genes as described in normalization method 2 in the “materials and methods” section. The normalized quantity of each RT sample was then divided by the median of the quantities of the normal samples (sample numbers 51, 52, 53, 54, 55, 56, 57, 58, 59, 60, 61, 62, 63, 64, 69 and 70, Table 1_{—}6 above), to obtain a value of fold up-regulation for each sample relative to the median of the normal samples.

[1702] FIG. 70B is a histogram showing over expression of the above-indicated LEM domain containing 1 (LEMD1) transcripts in cancerous Lung samples relative to the normal samples.

[1703] As is evident from FIG. 70B, the expression of LEM domain containing 1 (LEMD1) transcripts detectable by the above amplicon non-small cell carcinoma samples was significantly higher than in the non-cancerous samples (sample numbers 51, 52, 53, 54, 55, 56, 57, 58, 59, 60, 61, 62, 63, 64, 69 and 70, Table 1_{—}6 above).

[1704] Notably an over-expression of at least 5 fold was found in 24 out of 57 non-small cell carcinoma samples, specifically in 16 out of 23 adenocarcinoma samples, in 5 out of 24 squamous cell carcinoma samples, and in 3 out of 10 large cell carcinoma samples. Expression was also higher in 2 out of 9 small cell carcinoma samples than in the non-cancerous samples.

[1705] Statistical analysis was applied to verify the significance of these results, as described below.

[1706] The P value for the difference in the expression levels of LEM domain containing 1 (LEMD1) transcripts detectable by the above amplicon in Lung non-small cell carcinoma samples versus the normal tissue samples was determined by T test as 6.80e-006. The P value for the difference in the expression levels of LEM domain containing 1 (LEMD1) transcripts detectable by the above amplicon in Lung adenocarcinoma samples versus the normal tissue samples was determined by T test as 1.04e-004. The P value for the difference in the expression levels of LEM domain containing 1 (LEMD1) transcripts detectable by the above amplicon in Lung squamous cell carcinoma samples versus the normal tissue samples was determined by T test as 2.63e-002.

[1707] Threshold of 5 fold over expression was found to differentiate between non-small cell carcinoma and normal samples with P value of 5.60e-003 as checked by exact Fisher test. Threshold of 5 fold over expression was found to differentiate between adenocarcinoma and normal samples with P value of 7.86e-005 as checked by exact Fisher test.

[1708] The above values demonstrate statistical significance of the results.

[1709] Primer pairs are also optionally and preferably encompassed within the present invention; for example, for the above experiment, the following primer pair was used as a non-limiting illustrative example only of a suitable primer pair: T58132_seg6F2 (SEQ ID NO: 271) forward primer; and T58132_seg6R2 (SEQ ID NO: 272) reverse primer.

[1710] The present invention also preferably encompasses any amplicon obtained through the use of any suitable primer pair; for example, for the above experiment, the following amplicon was obtained as a non-limiting illustrative example only of a suitable amplicon: T58132_seg6F2R2 (SEQ ID NO: 273).

[1711] Expression of Homo sapiens LEM Domain Containing 1 (LEMD1) T58132 Transcripts which are Detectable by Amplicon as Depicted in Sequence Name T58132_seg6F2R2 (SEQ ID NO: 273) in Normal and Cancerous Ovary Tissues

[1712] Expression of Homo sapiens LEM domain containing 1 (LEMD1) transcripts detectable by or according to seg6F2R2—T58132_seg6F2R2 (SEQ ID NO: 273) amplicon and primers T58132_seg6F2 (SEQ ID NO: 271) and T58132_seg6R2 (SEQ ID NO: 272) was measured by real time PCR. In parallel the expression of four housekeeping genes—SDHA (GenBank Accession No. NM_{—}004168 (SEQ ID NO:335); amplicon—SDHA-amplicon (SEQ ID NO:299)), HPRT1 (GenBank Accession No. NM_{—}000194 (SEQ ID NO:337); amplicon —HPRT1-amplicon (SEQ ID NO: 305) (SEQ ID NO: 305)), PBGD (GenBank Accession No. BC019323 (SEQ ID NO:336); amplicon—PBGD-amplicon (SEQ ID NO: 302)) and GAPDH (GenBank Accession No. BC026907 (SEQ ID NO:338); GAPDH amplicon (SEQ ID NO: 308)) was measured similarly. For each RT sample, the expression of the above amplicon was normalized to the geometric mean of the quantities of the housekeeping genes. The normalized quantity of each RT sample was then divided by the median of the quantities of the normal post-mortem (PM) samples (sample numbers 45, 46, 71 and 48, Table 1_{—}1 above), to obtain a value of fold up-regulation for each sample relative to the median of the normal PM samples.

[1713] FIG. 71A is a histogram showing over expression of the Homo sapiens LEM domain containing 1 (LEMD1) transcripts in cancerous Ovary samples relative to the normal samples.

[1714] As is evident from FIG. 71A, the expression of Homo sapiens LEM domain containing 1 (LEMD1) transcripts detectable by the above amplicon in adenocarcinoma samples was significantly higher than in the non-cancerous samples (sample numbers 45, 46, 71 and 48, Table 1_{—}1 above). Notably an over-expression of at least 5 fold was found in 30 out of 43 adenocarcinoma samples, specifically in 23 out of 30 serous carcinoma samples and in 4 out of 6 mucinous carcinoma samples.

[1715] Statistical analysis was applied to verify the significance of these results, as described below.

[1716] The P value for the difference in the expression levels of Homo sapiens LEM domain containing 1 (LEMD1) transcripts detectable by the above amplicon in Ovary serous carcinoma samples versus the normal tissue samples was determined by T test as 1.04e-002. The P value for the difference in the expression levels of Homo sapiens LEM domain containing 1 (LEMI1) transcripts detectable by the above amplicon in Ovary adenocarcinoma samples versus the normal tissue samples was determined by T test as 1.94e-003.

[1717] Threshold of 5 fold over expression was found to differentiate between serous carcinoma and normal samples with P value of 7.12e-003 as checked by exact Fisher test. Threshold of 5 fold over expression was found to differentiate between all adenocarcinoma and normal samples with P value of 1.33e-002 as checked by exact Fisher test.

[1718] The above values demonstrate statistical significance of the results.

[1719] Primer pairs are also optionally and preferably encompassed within the present invention; for example, for the above experiment, the following primer pair was used as a non-limiting illustrative example only of a suitable primer pair: T58132_seg6F2 (SEQ ID NO: 271) forward primer; and T58132_seg6R2 (SEQ ID NO: 272) reverse primer.

[1720] The present invention also preferably encompasses any amplicon obtained through the use of any suitable primer pair; for example, for the above experiment, the following amplicon was obtained as a non-limiting illustrative example only of a suitable amplicon: T58132_seg6F2R2 (SEQ ID NO: 273).

[1721] Expression of Homo sapiens LEM domain containing 1 (LEMD1) transcripts detectable by or according to seg6F2R2—T58132_seg6F2R2 (SEQ ID NO: 273) amplicon and primers T58132_seg6F2 (SEQ ID NO: 271) and T58132_seg6R (SEQ ID NO: 272) was further measured by real time PCR using enlarged panel as shown in Table 1_{—}5. In parallel the expression of four housekeeping genes—SDHA (GenBank Accession No. NM_{—}004168 (SEQ ID NO:335); amplicon—SDHA-amplicon (SEQ ID NO:299)), HPRT1 (GenBank Accession No. NM_{—}000194 (SEQ ID NO:337); amplicon—HPRT1-amplicon (SEQ ID NO: 305) (SEQ ID NO: 305)), and PBGD (GenBank Accession No. BC019323 (SEQ ID NO:336); amplicon—PBGD-amplicon (SEQ ID NO: 302)) was measured similarly. For each RT sample, the expression of the above amplicon was normalized to the normalization factor calculated from the expression of these house keeping genes as described in normalization method 2 in the “materials and methods” section. The normalized quantity of each RT sample was then divided by the median of the quantities of the normal samples (sample numbers 52-78, Table 1_{—}5 above), to obtain a value of fold up-regulation for each sample relative to the median of the normal samples.

[1722] FIG. 71B is a histogram showing over expression of the above-indicated Homo sapiens LEM domain containing 1 (LEMD1) transcripts in cancerous Ovary samples relative to the normal samples.

[1723] As is evident from FIG. 71B, the expression of Homo sapiens LEM domain containing 1 (LEMD1) transcripts detectable by the above amplicon in adenocarcinoma samples was significantly higher than in the non-cancerous samples (sample numbers 41, 43-78, Table 1_{—}5 above). In samples from serous adenocarcinoma correlation between over expression level and patient's age could be observed—over expression was higher as the patients were older. Notably an over-expression of at least 5 fold was found in 51 out of 74 adenocarcinoma samples, specifically in 26 out of 38 serous carcinoma samples, in 8 out of 10 endometroid-type adenocarcinoma samples, and in 7 out of 12 mucinous carcinoma samples.

[1724] Statistical analysis was applied to verify the significance of these results, as described below.

[1725] The P value for the difference in the expression levels of Homo sapiens LEM domain containing 1 (LEMD1) transcripts detectable by the above amplicon in Ovary adenocarcinoma samples versus the non cancerous tissue samples was determined by T test as 7.73e-08. Threshold of 5 fold over expression was found to differentiate between adeonocarcinoma and non-cancerous samples with P value of 1.96e-12 as checked by exact Fisher test.

[1726] The above values demonstrate statistical significance of the results.

[1727] Primer pairs are also optionally and preferably encompassed within the present invention; for example, for the above experiment, the following primer pair was used as a non-limiting illustrative example only of a suitable primer pair: T58132_seg6F2 (SEQ ID NO: 271) forward primer; and T58132_seg6R2 (SEQ ID NO: 272) reverse primer.

[1728] The present invention also preferably encompasses any amplicon obtained through the use of any suitable primer pair; for example, for the above experiment, the following amplicon was obtained as a non-limiting illustrative example only of a suitable amplicon: T58132_seg6F2R2 (SEQ ID NO: 273).

[1729] Expression of Homo sapiens LEM Domain Containing 1 (LEMD1) T58132 Transcripts which are Detectable by Amplicon as Depicted in Sequence Name T58132_seg8F2R2 (SEQ ID NO: 276) in Normal and Cancerous Lung Tissues

[1730] Expression of Homo sapiens LEM domain containing 1 (LEMD1) transcripts detectable by or according to seg8F2R2—T58132_seg8F2R2 (SEQ ID NO: 276) amplicon and primers T58132_seg8F2 (SEQ ID NO: 274) and T58132_seg8R2 (SEQ ID NO: 275) was measured by real time PCR. In parallel the expression of four housekeeping genes—HPRT1 (GenBank Accession No. NM_{—}000194 (SEQ ID NO:337); amplicon—HPRT1-amplicon (SEQ ID NO: 305) (SEQ ID NO: 305)), PBGD (GenBank Accession No. BC019323 (SEQ ID NO:336); amplicon—PBGD-amplicon (SEQ ID NO: 302)), SDHA (GenBank Accession No. NM_{—}004168 (SEQ ID NO:335); amplicon—SDHA-amplicon (SEQ ID NO:299)) and Ubiquitin (GenBank Accession No. BC000449 (SEQ ID NO:341); amplicon—Ubiquitin-amplicon (SEQ ID NO: 317)) was measured similarly. For each RT sample, the expression of the above amplicon was normalized to the geometric mean of the quantities of the housekeeping genes. The normalized quantity of each RT sample was then divided by the median of the quantities of the normal post-mortem (PM) samples (sample numbers 47, 48, 49, 50, 90, 91, 92, 93, 96, 97, 98 and 99, Table 1_{—}2 above), to obtain a value of fold up-regulation for each sample relative to the median of the normal PM samples.

[1731] FIG. 72A is a histogram showing over expression of the Homo sapiens LEM domain containing 1 (LEMD1) transcripts in cancerous Lung samples relative to the normal samples.

[1732] As is evident from FIG. 72A, the expression of Homo sapiens LEM domain containing 1 (LEMD1) transcripts detectable by the above amplicon in adenocarcinoma was significantly higher than in the non-cancerous samples (sample numbers 47, 48, 49, 50, 90, 91, 92, 93, 96, 97, 98 and 99, Table 1_{—}2 above) and was higher in a few squamous cell carcinoma samples than in the non-cancerous samples. Notably an over-expression of at least 5 fold was in 17 out of 35 non-small cell carcinoma samples, specifically in 12 out of 15 adenocarcinoma samples and in 4 out of 16 squamous cell carcinoma samples.

[1733] Statistical analysis was applied to verify the significance of these results, as described below.

[1734] The P value for the difference in the expression levels of Homo sapiens LEM domain containing 1 (LEMD1) transcripts detectable by the above amplicon in Lung adenocarcinoma samples versus the normal tissue samples was determined by T test as 2.08e-003. The P value for the difference in the expression levels of Homo sapiens LEM domain containing 1 (LEMD1) transcripts detectable by the above amplicon in Lung non-small cell carcinoma samples versus the normal tissue samples was determined by T test as 4.66e-004.

[1735] Threshold of 5 fold over expression was found to differentiate between adenocarcinoma and normal samples with P value of 2.62e-005 as checked by exact Fisher test. Threshold of 5 fold over expression was found to differentiate between all non-small cell carcinoma and normal samples with P value of 1.66e-003 as checked by exact Fisher test.

[1736] The above values demonstrate statistical significance of the results.

[1737] Primer pairs are also optionally and preferably encompassed within the present invention; for example, for the above experiment, the following primer pair was used as a non-limiting illustrative example only of a suitable primer pair: T58132_seg8F2 (SEQ ID NO: 274) forward primer; and T58132_seg8R2 (SEQ ID NO: 275) reverse primer.

[1738] The present invention also preferably encompasses any amplicon obtained through the use of any suitable primer pair; for example, for the above experiment, the following amplicon was obtained as a non-limiting illustrative example only of a suitable amplicon: T58132_seg8F2R2 (SEQ ID NO: 276)

[1739] Expression of LEM domain containing 1 (LEMD1) transcripts detectable by or according to seg8F2R2—T58132_seg8F2R2 (SEQ ID NO: 276) amplicon and primers T58132_seg8F2 (SEQ ID NO: 274) and T58132_seg8R2 (SEQ ID NO: 275) was further measured by real time PCR using enlarged panel as shown in Table 1_{—}6. In parallel the expression of four housekeeping genes—HPRT1 (GenBank Accession No. NM 000194 (SEQ ID NO:337); amplicon—HPRT1-amplicon (SEQ ID NO: 305) (SEQ ID NO: 305)), PBGD (GenBank Accession No. BC019323 (SEQ ID NO:336); amplicon—PBGD-amplicon (SEQ ID NO: 302)), SDHA (GenBank Accession No. NM_{—}004168 (SEQ ID NO:335); amplicon—SDHA-amplicon (SEQ ID NO:299)) and Ubiquitin (GenBank Accession No. BC000449 (SEQ ID NO:341); amplicon—Ubiquitin-amplicon (SEQ ID NO: 317)) was measured similarly. For each RT sample, the expression of the above amplicon was normalized to the normalization factor calculated from the expression of these house keeping genes as described in normalization method 2 in the “materials and methods” section. The normalized quantity of each RT sample was then divided by the median of the quantities of the normal samples (sample numbers 51, 52, 53, 54, 55, 56, 57, 58, 59, 60, 61, 62, 63, 64, 69 and 70, Table 1_{—}6 above), to obtain a value of fold up-regulation for each sample relative to the median of the normal samples.

[1740] FIG. 72B is a histogram showing over expression of the above-indicated LEM domain containing 1 (LEMD1) transcripts in cancerous Lung samples relative to the normal samples.

[1741] As is evident from FIG. 72B, the expression of LEM domain containing 1 (LEMD1) transcripts detectable by the above amplicon non-small cell carcinoma samples was significantly higher than in the non-cancerous samples (sample numbers 51, 52, 53, 54, 55, 56, 57, 58, 59, 60, 61, 62, 63, 64, 69 and 70, Table 1_{—}6 above). Notably an over-expression of at least 5 fold was found in 29 out of 57 non-small cell carcinoma samples, specifically in 16 out of 23 adenocarcinoma samples, in 10 out of 24 squamous cell carcinoma samples, in 3 out of 10 large cell carcinoma samples. Expression was also higher in 3 out of 9 small cell carcinoma samples.

[1742] Statistical analysis was applied to verify the significance of these results, as described below.

[1743] The P value for the difference in the expression levels of LEM domain containing 1 (LEMD1) transcripts detectable by the above amplicon in Lung non small cell carcinoma samples versus the normal tissue samples was determined by T test as 1.51e-005. The P value for the difference in the expression levels of LEM domain containing 1 (LEMD1) transcripts detectable by the above amplicon in adenocarcinoma samples versus the normal tissue samples was determined by T test as 2.24e-004. The P value for the difference in the expression levels of LEM domain containing 1 (LEMD1) transcripts detectable by the above amplicon in Lung squamous cell carcinoma samples versus the normal tissue samples was determined by T test as 4.27e-002.

[1744] Threshold of 5 fold over expression was found to differentiate between non-small cell carcinoma and normal samples with P value of 5.25e-003 as checked by exact Fisher test. Threshold of 5 fold over expression was found to differentiate between adenocarcinoma and normal samples with P value of 4.94e-004 as checked by exact Fisher test. Threshold of 5 fold over expression was found to differentiate between squamous cell carcinoma and normal samples with P value of 4.92e-002 as checked by exact Fisher test.

[1745] The above values demonstrate statistical significance of the results.

[1746] Primer pairs are also optionally and preferably encompassed within the present invention; for example, for the above experiment, the following primer pair was used as a non-limiting illustrative example only of a suitable primer pair: T58132_seg8F2 (SEQ ID NO: 274) forward primer; and T58132_seg8R2 (SEQ ID NO: 275) reverse primer.

[1747] The present invention also preferably encompasses any amplicon obtained through the use of any suitable primer pair; for example, for the above experiment, the following amplicon was obtained as a non-limiting illustrative example only of a suitable amplicon: T58132_seg8F2R2 (SEQ ID NO: 276).

[1748] Expression of Homo sapiens LEM Domain Containing 1 (LEMD1) T58132 Transcripts which are Detectable by Amplicon as Depicted in Sequence Name T58132_seg8F2R2 (SEQ ID NO: 276) in Different Normal Tissues

[1749] Expression of Homo sapiens LEM domain containing 1 (LEMD1) transcripts detectable by or according to seg8F2R2—T58132_seg8F2R2 (SEQ ID NO: 276) amplicon and primers T58132 seg8F2 (SEQ ID NO: 274) and T58132_seg8R2 (SEQ ID NO: 275) was measured by real time PCR. In parallel the expression of four housekeeping genes—SDHA (GenBank Accession No. NM_{—}004168 (SEQ ID NO:335); amplicon—SDHA-amplicon (SEQ ID NO:299)), Ubiquitin (GenBank Accession No. BC000449 (SEQ ID NO:341); amplicon—Ubiquitin-amplicon (SEQ ID NO: 317)), RPL19 (GenBank Accession No. NM_{—}000981 (SEQ ID NO:342); RPL19 amplicon (SEQ ID NO: 320)) and TATA box (GenBank Accession No. NM_{—}003194 (SEQ ID NO:343); TATA amplicon (SEQ ID NO: 323)) was measured similarly. For each RT sample, the expression of the above amplicon was normalized to the geometric mean of the quantities of the housekeeping genes. The normalized quantity of each RT sample was then divided by the median of the quantities of the colon samples (sample numbers 1, 2 and 3, Table 1_{—}9 above), to obtain a value of relative expression of each sample relative to the median of the colon samples.

[1750] FIG. 73A is a histogram showing the expression of Homo sapiens LEM domain containing 1 (LEMD1) T58132 transcripts which are detectable by amplicon as depicted in sequence name T58132_seg8F2R2 (SEQ ID NO: 276) in different normal tissues.

[1751] Expression of Homo sapiens LEM domain containing 1 (LEMD1) transcripts detectable by or according to seg8F2R2—T58132_seg8F2R2 (SEQ ID NO: 276) amplicon and primers T58132_seg8F2 (SEQ ID NO: 274) and T58132_seg8R2 (SEQ ID NO: 275) was further measured by real time PCR using updated panel as shown in Table 1_{—}10. In parallel the expression of four housekeeping genes—SDHA (GenBank Accession No. NM_{—}004168 (SEQ ID NO:335); amplicon—SDHA-amplicon (SEQ ID NO:299)), Ubiquitin (GenBank Accession No. BC000449 (SEQ ID NO:341); amplicon—Ubiquitin-amplicon (SEQ ID NO: 317)), and TATA box (GenBank Accession No. NM_{—}003194 (SEQ ID NO:343); TATA amplicon (SEQ ID NO: 323)) was measured similarly. For each RT sample, the expression of the above amplicon was normalized to the normalization factor calculated from the expression of these house keeping genes as described in normalization method 2 in the “materials and methods” section. The normalized quantity of each RT sample was then divided by the median of the quantities of the ovary samples (sample numbers 31, 32, 33 and 34, Table 1_{—}10 above), to obtain a value of relative expression of each sample relative to the median of the ovary samples as presented in FIG. 73B. The normalized quantity of each RT sample was also divided by the median of the quantities of the colon samples (sample numbers 3, 4, 5, Table 1_{—}10 above), to obtain a value of relative expression of each sample relative to the median of the colon samples as presented in FIG. 73C.

[1752] Expression of Homo sapiens LEM Domain Containing 1 (LEMD1) T58132 Transcripts which are Detectable by Amplicon as Depicted in Sequence Name T58132_seg8F2R2 (SEQ ID NO: 276) in Normal and Cancerous Ovary Tissues

[1753] Expression of Homo sapiens LEM domain containing 1 (LEMD1) transcripts detectable by or according to seg8F2R2—T58132_seg8F2R2 (SEQ ID NO: 276) amplicon and primers T58132_seg8F2 (SEQ ID NO: 274) and T58132_seg8R2 (SEQ ID NO: 275) was measured by real time PCR. In parallel the expression of four housekeeping genes—SDHA (GenBank Accession No. NM_{—}004168 (SEQ ID NO:335); amplicon—SDHA-amplicon (SEQ ID NO:299)), HPRT1 (GenBank Accession No. NM 000194 (SEQ ID NO:337); amplicon—HPRT1-amplicon (SEQ ID NO: 305) (SEQ ID NO: 305)), PBGD (GenBank Accession No. BC019323 (SEQ ID NO:336); amplicon—PBGD-amplicon (SEQ ID NO: 302)) and GAPDH (GenBank Accession No. BC026907 (SEQ ID NO:338); GAPDH amplicon (SEQ ID NO: 308)) was measured similarly. For each RT sample, the expression of the above amplicon was normalized to the geometric mean of the quantities of the housekeeping genes. The normalized quantity of each RT sample was then divided by the median of the quantities of the normal post-mortem (PM) samples (sample numbers 45, 46, 71 and 48, Table 1_{—}1 above), to obtain a value of fold up-regulation for each sample relative to the median of the normal PM samples.

[1754] FIG. 74A is a histogram showing over expression of the Homo sapiens LEM domain containing 1 (LEMD1) transcripts in cancerous Ovary samples relative to the normal samples.

[1755] As is evident from FIG. 74A, the expression of Homo sapiens LEM domain containing 1 (LEMD1) transcripts detectable by the above amplicon in adenocarcinoma samples was significantly higher than in the non-cancerous samples (sample numbers 45, 46, 71 and 48, Table 1_{—}1 above). Notably an over-expression of at least 5 fold was found in 37 out of 43 adenocarcinoma samples, specifically in 26 out of 30 serous carcinoma samples and in 6 out of 6 mucinous carcinoma samples.

[1756] Statistical analysis was applied to verify the significance of these results, as described below.

[1757] The P value for the difference in the expression levels of Homo sapiens LEM domain containing 1 (LEMD1) transcripts detectable by the above amplicon in Ovary serous carcinoma samples versus the normal tissue samples was determined by T test as 1.24e-002. The P value for the difference in the expression levels of Homo sapiens LEM domain containing 1 (LEMD1) transcripts detectable by the above amplicon in all ovary adenocarcinoma samples versus the normal tissue samples was determined by T test as 4.14e-003.

[1758] Threshold of 5 fold over expression was found to differentiate between serous carcinoma and normal samples with P value of 1.51 e-003 as checked by exact Fisher test. Threshold of 5 fold over expression was found to differentiate between mucinous carcinoma and normal samples with P value of 4.76e-003 as checked by exact Fisher test. Threshold of 5 fold over expression was found to differentiate between all adenocarcinoma and normal samples with P value of 1.18e-003 as checked by exact Fisher test.

[1759] The above values demonstrate statistical significance of the results.

[1760] Primer pairs are also optionally and preferably encompassed within the present invention; for example, for the above experiment, the following primer pair was used as a non-limiting illustrative example only of a suitable primer pair: T58132_seg8F2 (SEQ ID NO: 274) forward primer; and T58132_seg8R2 (SEQ ID NO: 275) reverse primer.

[1761] The present invention also preferably encompasses any amplicon obtained through the use of any suitable primer pair; for example, for the above experiment, the following amplicon was obtained as a non-limiting illustrative example only of a suitable amplicon: T58132_seg8F2R2 (SEQ ID NO: 276).

[1762] Expression of Homo sapiens LEM domain containing 1 (LEMD1) transcripts detectable by or according to seg8F2R2—T58132_seg8F2R2 (SEQ ID NO: 276) amplicon and primers T58132_seg8F2 (SEQ ID NO: 274) and T58132_seg8R2 (SEQ ID NO: 275) was further measured by real time PCR using enlarged panel as shown in Table 1_{—}5. In parallel the expression of four housekeeping genes—SDHA (GenBank Accession No. NM_{—}004168 (SEQ ID NO:335); amplicon—SDHA-amplicon (SEQ ID NO:299)), HPRT1 (GenBank Accession No. NM_{—}000194 (SEQ ID NO:337); amplicon—HPRT1-amplicon (SEQ ID NO: 305) (SEQ ID NO: 305)), and PBGD (GenBank Accession No. BC019323 (SEQ ID NO:336); amplicon—PBGD-amplicon (SEQ ID NO: 302)) was measured similarly. For each RT sample, the expression of the above amplicon was normalized to the normalization factor calculated from the expression of these house keeping genes as described in normalization method 2 in the “materials and methods” section. The normalized quantity of each RT sample was then divided by the median of the quantities of the normal samples (sample numbers 52-78, Table 1_{—}5 above), to obtain a value of fold up-regulation for each sample relative to the median of the normal samples.

[1763] FIG. 74B is a histogram showing over expression of the above-indicated Homo sapiens LEM domain containing 1 (LEMD1) transcripts in cancerous Ovary samples relative to the normal samples.

[1764] As is evident from FIG. 74B, the expression of Homo sapiens LEM domain containing 1 (LEMD1) transcripts detectable by the above amplicon in adenocarcinoma samples was significantly higher than in the non-cancerous samples (sample numbers 41, 43, 44-78, Table 1_{—}5 above). In samples from serous adenocarcinoma correlation between over expression level and patient's age could be observed—over expression was higher as the patients were older. Notably an over-expression of at least 5 fold was found in 58 out of 74 adenocarcinoma samples, specifically in 31 out of 38 serous carcinoma samples, in 8 out of 10 endometroid-type adenocarcinoma samples, and in 8 out of 12 mucinous carcinoma samples.

[1765] Statistical analysis was applied to verify the significance of these results, as described below.

[1766] The P value for the difference in the expression levels of Homo sapiens LEM domain containing 1 (LEMD1) transcripts detectable by the above amplicon in Ovary adenocarcinoma samples versus the non cancerous tissue samples was determined by T test as 1.38e-04. Threshold of 5 fold over expression was found to differentiate between adeonocarcinoma and non-cancerous samples with P value of 4.68e-13 as checked by exact Fisher test.

[1767] The above values demonstrate statistical significance of the results.

[1768] Primer pairs are also optionally and preferably encompassed within the present invention; for example, for the above experiment, the following primer pair was used as a non-limiting illustrative example only of a suitable primer pair: T58132_seg8F2 (SEQ ID NO: 274) forward primer; and T58132_seg8R2 (SEQ ID NO: 275) reverse primer.

[1769] The present invention also preferably encompasses any amplicon obtained through the use of any suitable primer pair; for example, for the above experiment, the following amplicon was obtained as a non-limiting illustrative example only of a suitable amplicon: T58132_seg8F2R2 (SEQ ID NO: 276).

[1770] Expression of Homo sapiens LEM Domain Containing 1 (LEMD1) T58132 Transcripts which are Detectable by Amplicon as Depicted in Sequence Name T58132_seg21 (SEQ ID NO: 279) in Normal and Cancerous Lung Tissues

[1771] Expression of Homo sapiens LEM domain containing 1 (LEMD1) transcripts detectable by or according to seg21—T58132_seg21 (SEQ ID NO: 279) amplicon and primers T58132_seg21F (SEQ ID NO: 277) and T58132_seg21R (SEQ ID NO: 278) was measured by real time PCR. In parallel the expression of four housekeeping genes—HPRT1 (GenBank Accession No. NM_{—}000194 (SEQ ID NO:337); amplicon—HPRT1-amplicon (SEQ ID NO: 305) (SEQ ID NO: 305)), PBGD (GenBank Accession No. BC019323 (SEQ ID NO:336); amplicon—PBGD-amplicon (SEQ ID NO: 302)), SDHA (GenBank Accession No. NM_{—}004168 (SEQ ID NO:335); amplicon—SDHA-amplicon (SEQ ID NO:299)) and Ubiquitin (GenBank Accession No. BC000449 (SEQ ID NO:341); amplicon—Ubiquitin-amplicon (SEQ ID NO: 317)) was measured similarly. For each RT sample, the expression of the above amplicon was normalized to the geometric mean of the quantities of the housekeeping genes. The normalized quantity of each RT sample was then divided by the median of the quantities of the normal post-mortem (PM) samples (sample numbers 47, 48, 49, 50, 90, 91, 92, 93, 96, 97, 98 and 99, Table 1_{—}2 above), to obtain a value of fold up-regulation for each sample relative to the median of the normal PM samples.

[1772] FIG. 75A is a histogram showing over expression of the Homo sapiens LEM domain containing 1 (LEMD1) transcripts in cancerous Lung samples relative to the normal samples.

[1773] As is evident from FIG. 75A, the expression of Homo sapiens LEM domain containing 1 (LEMD1) transcripts detectable by the above amplicon in adenocarcinoma was significantly higher than in the non-cancerous samples (sample numbers 47, 48, 49, 50, 90, 91, 92, 93, 96, 97, 98 and 99, Table 1_{—}2 above) and was higher in a few squamous cell carcinoma samples than in the non-cancerous samples. Notably an over-expression of at least 5 fold was found in 14 out of 35 non-small cell carcinoma samples, specifically in 9 out of 15 adenocarcinoma samples and in 4 out of 16 squamous cell carcinoma samples.

[1774] Statistical analysis was applied to verify the significance of these results, as described below.

[1775] The P value for the difference in the expression levels of Homo sapiens LEM domain containing 1 (LEMD1) transcripts detectable by the above amplicon in Lung adenocarcinoma samples versus the normal tissue samples was determined by T test as 6.20e-003. The P value for the difference in the expression levels of Homo sapiens LEM domain containing 1 (LEMD1) transcripts detectable by the above amplicon in all Lung non-small cell carcinoma samples versus the normal tissue samples was determined by T test as 1.34e-003.

[1776] Threshold of 5 fold over expression was found to differentiate between adenocarcinoma and normal samples with P value of 7.42e-003 as checked by exact Fisher test. Threshold of 5 fold over expression was found to differentiate between all non-small cell carcinoma and normal samples with P value of 4.12e-002 as checked by exact Fisher test.

[1777] The above values demonstrate statistical significance of the results.

[1778] Primer pairs are also optionally and preferably encompassed within the present invention; for example, for the above experiment, the following primer pair was used as a non-limiting illustrative example only of a suitable primer pair: T58132_seg21F (SEQ ID NO: 277) forward primer; and T58132_seg21R (SEQ ID NO: 278) reverse primer.

[1779] The present invention also preferably encompasses any amplicon obtained through the use of any suitable primer pair; for example, for the above experiment, the following amplicon was obtained as a non-limiting illustrative example only of a suitable amplicon: T58132_seg21 (SEQ ID NO: 279).

[1780] Expression of LEM domain containing 1 (LEMD1) transcripts detectable by or according to seg21WT—T58132_seg21WT (SEQ ID NO: 279) amplicon and primers T58132_seg21WTF (SEQ ID NO: 277) and T58132_seg21WTR (SEQ ID NO: 278) was further measured by real time PCR using enlarged panel as shown in Table 1_{—}6. In parallel the expression of four housekeeping genes—HPRT1 (GenBank Accession No. NM_{—}000194 (SEQ ID NO:337); amplicon—HPRT1-amplicon (SEQ ID NO: 305) (SEQ ID NO: 305)), PBGD (GenBank Accession No. BC019323 (SEQ ID NO:336); amplicon—PBGD-amplicon (SEQ ID NO: 302)), SDHA (GenBank Accession No. NM_{—}004168 (SEQ ID NO:335); amplicon—SDHA-amplicon (SEQ ID NO:299)) and Ubiquitin (GenBank Accession No. BC000449 (SEQ ID NO:341); amplicon—Ubiquitin-amplicon (SEQ ID NO: 317)) was measured similarly. For each RT sample, the expression of the above amplicon was normalized to the normalization factor calculated from the expression of these house keeping genes as described in normalization method 2 in the “materials and methods” section. The normalized quantity of each RT sample was then divided by the median of the quantities of the normal samples (sample numbers 51, 52, 53, 54, 55, 56, 57, 58, 59, 60, 61, 62, 63, 64, 69 and 70, Table 1_{—}6 above), to obtain a value of fold up-regulation for each sample relative to the median of the normal samples.

[1781] FIG. 75B is a histogram showing over expression of the above-indicated LEM domain containing 1 (LEMD1) transcripts in cancerous Lung samples relative to the normal samples.

[1782] As is evident from FIG. 75B, the expression of LEM domain containing 1 (LEMD1) transcripts detectable by the above amplicon in non-small cell carcinoma samples was significantly higher than in the non-cancerous samples (sample numbers 51, 52, 53, 54, 55, 56, 57, 58, 59, 60, 61, 62, 63, 64, 69 and 70, Table 1_{—}6 above).

[1783] Notably an over-expression of at least 5 fold was found in 32 out of 58 non-small cell carcinoma samples, specifically in 16 out of 24 adenocarcinoma samples, in 10 out of 24 squamous cell carcinoma samples, in 6 out of 10 large cell carcinoma samples.

[1784] Expression was also higher in 3 out of 9 small cell carcinoma samples than in the non-cancerous samples.

[1785] Statistical analysis was applied to verify the significance of these results, as described below.

[1786] The P value for the difference in the expression levels of LEM domain containing 1 (LEMD1) transcripts detectable by the above amplicon in Lung non-small cell carcinoma samples versus the normal tissue samples was determined by T test as 3.47e-004. The P value for the difference in the expression levels of LEM domain containing 1 (LEMD1) transcripts detectable by the above amplicon in Lung adenocarcinoma samples versus the normal tissue samples was determined by T test as 2.10e-003. The P value for the difference in the expression levels of LEM domain containing 1 (LEMD1) transcripts detectable by the above amplicon in Lung squamous cell carcinoma samples versus the normal tissue samples was determined by T test as 3.14e-003.

[1787] Threshold of 5 fold over expression was found to differentiate between non-small cell carcinoma and normal samples with P value of 3.26e-004 as checked by exact Fisher test. Threshold of 5 fold over expression was found to differentiate between adenocarcinoma and normal samples with P value of 1.36e-004 as checked by exact Fisher test. Threshold of 5 fold over expression was found to differentiate between squamous cell carcinoma and normal samples with P value of 1.46e-002 as checked by exact Fisher test. Threshold of 5 fold over expression was found to differentiate between large cell carcinoma and normal samples with P value of 5.24e-003 as checked by exact Fisher test.

[1788] The above values demonstrate statistical significance of the results.

[1789] Primer pairs are also optionally and preferably encompassed within the present invention; for example, for the above experiment, the following primer pair was used as a non-limiting illustrative example only of a suitable primer pair: T58132_seg21WTF (SEQ ID NO: 277) forward primer; and T58132_seg21WTR (SEQ ID NO: 278) reverse primer.

[1790] The present invention also preferably encompasses any amplicon obtained through the use of any suitable primer pair; for example, for the above experiment, the following amplicon was obtained as a non-limiting illustrative example only of a suitable amplicon: T58132_seg21WT (SEQ ID NO: 279).

Expression of Homo sapiens LEM Domain Containing 1 (LEMD1) T58132 Transcripts which are Detectable by Amplicon as Depicted in Sequence Name T58132_seg21 (SEQ ID NO: 279) in Different Normal Tissues

[1791] Expression of Homo sapiens LEM domain containing 1 (LEMD1) transcripts detectable by or according to seg21—T58132_seg21 (SEQ ID NO: 279) amplicon and primers T58132_seg21F (SEQ ID NO: 277) and T58132_seg21R (SEQ ID NO: 278) was measured by real time PCR. In parallel the expression of four housekeeping genes—SDHA (GenBank Accession No. NM_{—}004168 (SEQ ID NO:335); amplicon—SDHA-amplicon (SEQ ID NO:299)), Ubiquitin (GenBank Accession No. BC000449 (SEQ ID NO:341); amplicon—Ubiquitin-amplicon (SEQ ID NO: 317)), RPL19 (GenBank Accession No. NM_{—}000981 (SEQ ID NO:342); RPL19 amplicon (SEQ ID NO: 320)) and TATA box (GenBank Accession No. NM_{—}003194 (SEQ ID NO:343); TATA amplicon (SEQ ID NO: 323)) was measured similarly. For each RT sample, the expression of the above amplicon was normalized to the geometric mean of the quantities of the housekeeping genes. The normalized quantity of each RT sample was then divided by the median of the quantities of the colon samples (sample numbers 1, 2 and 3, Table 1_{—}9 above), to obtain a value of relative expression of each sample relative to the median of the colon samples.

[1792] FIG. 76A is a histogram showing the expression of Homo sapiens LEM domain containing 1 (LEMD1) T58132 transcripts which are detectable by amplicon as depicted in sequence name T58132_seg21 (SEQ ID NO: 279) in different normal tissues.

[1793] Expression of Homo sapiens LEM domain containing 1 (LEMD1) transcripts detectable by or according to seg21WT-T58132_seg21WT (SEQ ID NO: 279) amplicon and primers T58132_seg21WTF (SEQ ID NO: 277) and T58132_seg21WTR (SEQ ID NO: 278) was further measured by real time PCR using updated panel as shown in Table 1_{—}10. In parallel the expression of four housekeeping genes—SDHA (GenBank Accession No. NM_{—}004168 (SEQ ID NO:335); amplicon—SDHA-amplicon (SEQ ID NO:299)), Ubiquitin (GenBank Accession No. BC000449 (SEQ ID NO:341); amplicon—Ubiquitin-amplicon (SEQ ID NO: 317)), and TATA box (GenBank Accession No. NM_{—}003194 (SEQ ID NO:343); TATA amplicon (SEQ ID NO: 323)) was measured similarly. For each RT sample, the expression of the above amplicon was normalized to the normalization factor calculated from the expression of these house keeping genes as described in normalization method 2 in the “materials and methods” section. The normalized quantity of each RT sample was then divided by the median of the quantities of the ovary samples (sample numbers 31, 32, 33 and 34, Table 1_{—}9 above), to obtain a value of relative expression of each sample relative to the median of the ovary samples as presented in FIG. 76B. The normalized quantity of each RT sample was also divided by the median of the quantities of the colon samples (sample numbers 3, 4, 5, Table 1_{—}9 above), to obtain a value of relative expression of each sample relative to the median of the colon samples as presented in FIG. 76C.

Expression of Homo sapiens LEM Domain Containing 1 (LEMD1) T58132 Transcripts which are Detectable by Amplicon as Depicted in Sequence Name T58132_seg21 (SEQ ID NO: 279) in Normal and Cancerous Ovary Tissues

[1794] Expression of Homo sapiens LEM domain containing 1 (LEMD1) transcripts detectable by or according to seg21—T58132_seg21 (SEQ ID NO: 279) amplicon and primers T58132_seg21F (SEQ ID NO: 277) and T58132_seg21R (SEQ ID NO: 278) was measured by real time PCR. In parallel the expression of four housekeeping genes—SDHA (GenBank Accession No. NM_{—}004168 (SEQ ID NO:335); amplicon—SDHA-amplicon (SEQ ID NO:299)), HPRT1 (GenBank Accession No. NM_{—}000194 (SEQ ID NO:337); amplicon—HPRT1-amplicon (SEQ ID NO: 305) (SEQ ID NO: 305)), PBGD (GenBank Accession No. BC019323 (SEQ ID NO:336); amplicon—PBGD-amplicon (SEQ ID NO: 302)) and GAPDH (GenBank Accession No. BC026907 (SEQ ID NO:338); GAPDH amplicon (SEQ ID NO: 308)) was measured similarly. For each RT sample, the expression of the above amplicon was normalized to the geometric mean of the quantities of the housekeeping genes. The normalized quantity of each RT sample was then divided by the median of the quantities of the normal post-mortem (PM) samples (sample numbers 45, 46, 71 and 48, Table 1_{—}1 above), to obtain a value of fold up-regulation for each sample relative to the median of the normal PM samples.

[1795] FIG. 77A is a histogram showing over expression of the Homo sapiens LEM domain containing 1 (LEMD1) transcripts in cancerous Ovary samples relative to the normal samples.

[1796] As is evident from FIG. 77A, the expression of Homo sapiens LEM domain containing 1 (LEMD1) transcripts detectable by the above amplicon adenocarcinoma samples was higher than in the non-cancerous samples (sample numbers 45, 46, 71 and 48, Table 1_{—}1 above). Notably an over-expression of at least 5 fold was found in 15 out of 43 adenocarcinoma samples.

[1797] Statistical analysis was applied to verify the significance of these results, as described below.

[1798] The P value for the difference in the expression levels of Homo sapiens LEM domain containing 1 (LEMD1) transcripts detectable by the above amplicon in Ovary serous carcinoma samples versus the normal tissue samples was determined by T test as 3.18e-003. The P value for the difference in the expression levels of Homo sapiens LEM domain containing 1 (LEMD1) transcripts detectable by the above amplicon in all ovary adenocarcinoma samples versus the normal tissue samples was determined by T test as 1.41e-003.

[1799] The above values demonstrate statistical significance of the results.

[1800] Primer pairs are also optionally and preferably encompassed within the present invention; for example, for the above experiment, the following primer pair was used as a non-limiting illustrative example only of a suitable primer pair: T58132_seg21F (SEQ ID NO: 277) forward primer; and T58132_seg21R (SEQ ID NO: 278) reverse primer.

[1801] The present invention also preferably encompasses any amplicon obtained through the use of any suitable primer pair; for example, for the above experiment, the following amplicon was obtained as a non-limiting illustrative example only of a suitable amplicon: T58132_seg21 (SEQ ID NO: 279).

[1802] Expression of Homo sapiens LEM domain containing 1 (LEMD1) transcripts detectable by or according to seg21WT—T58132_seg21WT (SEQ ID NO: 279) amplicon and primers T58132_seg21WTF (SEQ ID NO: 277) and T58132_seg21WTR (SEQ ID NO: 278) was further measured by real time PCR using enlarged panel as shown in Table 1_{—}5. In parallel the expression of four housekeeping genes—SDHA (GenBank Accession No. NM_{—}004168 (SEQ ID NO:335); amplicon—SDHA-amplicon (SEQ ID NO:299)), HPRT1 (GenBank Accession No. NM_{—}000194 (SEQ ID NO:337); amplicon—HPRT1-amplicon (SEQ ID NO: 305) (SEQ ID NO: 305)), and PBGD (GenBank Accession No. BC019323 (SEQ ID NO:336); amplicon—PBGD-amplicon (SEQ ID NO: 302)) was measured similarly. For each RT sample, the expression of the above amplicon was normalized to the normalization factor calculated from the expression of these house keeping genes as described in normalization method 2 in the “materials and methods” section. The normalized quantity of each RT sample was then divided by the median of the quantities of the normal samples (sample numbers 52-78, Table 1_{—}5 above), to obtain a value of fold up-regulation for each sample relative to the median of the normal samples.

[1803] FIG. 77B is a histogram showing over expression of the above-indicated Homo sapiens LEM domain containing 1 (LEMD1) transcripts in cancerous Ovary samples relative to the normal samples.

[1804] As is evident from FIG. 77B, the expression of Homo sapiens LEM domain containing 1 (LEMD1) transcripts detectable by the above amplicon in adenocarcinoma samples was higher than in the non-cancerous samples (sample numbers 41, 43, 44-78, Table 1_{—}5 above). In samples from serous adenocarcinoma correlation between over expression level and patient's age could be observed-over expression was higher as the patients were older. Notably an over-expression of at least 5 fold was found in 20 out of 74 adenocarcinoma samples, specifically in 12 out of 38 serous carcinoma samples, in 3 out of 10 endometroid-type adenocarcinoma samples, and in 2 out of 12 mucinous carcinoma samples.

[1805] Statistical analysis was applied to verify the significance of these results, as described below.

[1806] The P value for the difference in the expression levels of Homo sapiens LEM domain containing 1 (LEMD1) transcripts detectable by the above amplicon in Ovary adenocarcinoma samples versus the non cancerous tissue samples was determined by T test as 8.20e-04. Threshold of 5 fold over expression was found to differentiate between adeonocarcinoma and non-cancerous samples with P value of 1.10e-04 as checked by exact Fisher test.

[1807] The above values demonstrate statistical significance of the results.

[1808] Primer pairs are also optionally and preferably encompassed within the present invention; for example, for the above experiment, the following primer pair was used as a non-limiting illustrative example only of a suitable primer pair: T58132_seg21WTF (SEQ ID NO: 277) forward primer; and T58132_seg21WTR (SEQ ID NO: 278) reverse primer.

[1809] The present invention also preferably encompasses any amplicon obtained through the use of any suitable primer pair; for example, for the above experiment, the following amplicon was obtained as a non-limiting illustrative example only of a suitable amplicon: T58132_seg21WT (SEQ ID NO: 279).

Expression of LEM Domain Containing 1 (LEMD1) T58132 Transcripts which are Detectable by Amplicon as Depicted in Sequence Name T58132_seg6F2R2 (SEQ ID NO: 273) in Normal and Cancerous Breast Tissues

[1810] Expression of LEM domain containing 1 (LEMD1) transcripts detectable by or according to seg6F2R2-T58132_seg6F2R2 (SEQ ID NO: 273) amplicon and primers T58132_seg6F2 (SEQ ID NO: 271) and T58132_seg6R2 (SEQ ID NO: 272) was measured by real time PCR. In parallel the expression of four housekeeping genes—PBGD (GenBank Accession No. BC019323 (SEQ ID NO:336); amplicon—PBGD-amplicon (SEQ ID NO: 302)), SDHA (GenBank Accession No. NM_{—}004168 (SEQ ID NO:335); amplicon—SDHA-amplicon (SEQ ID NO:299)), RPL19 (GenBank Accession No. NM_{—}000981 (SEQ ID NO:342); RPL19 amplicon (SEQ ID NO: 320)) and G6PD (GenBank Accession No. NM_{—}000402 (SEQ ID NO:339); G6PD amplicon (SEQ ID NO: 311)) was measured similarly. For each RT sample, the expression of the above amplicon was normalized to the normalization factor calculated from the expression of these house keeping genes as described in normalization method 2 in the “materials and methods” section. The normalized quantity of each RT sample was then divided by the median of the quantities of the normal samples (Sample Nos. 43, 45, 46, 47, 48, 49, 50, 51, 52, 54, 56, 58, 59, 60, 61, 62, 63, 64, 65, 66, 67, 68 and 69, Table 1_{—}7, above), to obtain a value of fold differential expression for each sample relative to the median of the normal samples.

[1811] In one experiment that was carried out no differential expression in the cancerous samples relative to the normal samples was observed.

[1812] Primer pairs are also optionally and preferably encompassed within the present invention; for example, for the above experiment, the following primer pair was used as a non-limiting illustrative example only of a suitable primer pair: T58132_seg6F2 (SEQ ID NO: 271) forward primer; and T58132_seg6R2 (SEQ ID NO: 272) reverse primer.

[1813] The present invention also preferably encompasses any amplicon obtained through the use of any suitable primer pair; for example, for the above experiment, the following amplicon was obtained as a non-limiting illustrative example only of a suitable amplicon: T58132_seg6F2R2 (SEQ ID NO: 273).

### Description for Cluster T86235

[1814] Cluster T86235 (internal ID 15560128) features 10 transcript(s) and 12 segment(s) of interest, the names for which are given in Tables 150 and 151, respectively. The selected protein variants are given in table 152.

TABLE 150
Transcripts of interest
Transcript Name

T86235_T5 (SEQ ID NO: 440)
T86235_T6 (SEQ ID NO: 441)
T86235_T7 (SEQ ID NO: 442)
T86235_T11 (SEQ ID NO: 443)
T86235_T13 (SEQ ID NO: 444)
T86235_T15 (SEQ ID NO: 445)
T86235_T18 (SEQ ID NO: 446)
T86235_T26 (SEQ ID NO: 447)
T86235_T32 (SEQ ID NO: 448)
T86235_T36 (SEQ ID NO: 449)

TABLE 151
Segments of interest
Segment Name

T86235_N2 (SEQ ID NO: 450)
T86235_N19 (SEQ ID NO: 451)
T86235_N33 (SEQ ID NO: 452)
T86235_N39 (SEQ ID NO: 453)
T86235_N41 (SEQ ID NO: 454)
T86235_N53 (SEQ ID NO: 455)
T86235_N55 (SEQ ID NO: 456)
T86235_N12 (SEQ ID NO: 457)
T86235_N13 (SEQ ID NO: 458)
T86235_N14 (SEQ ID NO: 459)
T86235_N46 (SEQ ID NO: 460)
T86235_N47 (SEQ ID NO: 461)

TABLE 152
Proteins of interest

| Protein Name | Corresponding Transcript(s) |
|---|---|
| T86235_P4 (SEQ ID NO: 469) | T86235_T13 (SEQ ID NO: 444); |
| | T86235_T15 (SEQ ID NO: 445) |
| T86235_P5 (SEQ ID NO: 470) | T86235_T5 (SEQ ID NO: 440) |
| T86235_P6 (SEQ ID NO: 471) | T86235_T6 (SEQ ID NO: 441) |
| T86235_P7 (SEQ ID NO: 472) | T86235_T7 (SEQ ID NO: 442) |
| T86235_P11 (SEQ ID NO: 473) | T86235_T11 (SEQ ID NO: 443) |
| T86235_P15 (SEQ ID NO: 474) | T86235_T18 (SEQ ID NO: 446) |
| T86235_P21 (SEQ ID NO: 475) | T86235_T26 (SEQ ID NO: 447) |
| T86235_P26 (SEQ ID NO: 476) | T86235_T32 (SEQ ID NO: 448) |
| T86235_P30 (SEQ ID NO: 477) | T86235_T36 (SEQ ID NO: 449) |

[1815] These sequences are variants of the known protein Trophinin-associated protein (SEQ ID NO:462) (SwissProt accession identifier TAST_HUMAN (SEQ ID NO: 463); known also according to the synonyms Tastin; Trophinin-assisting protein), referred to herein as the previously known protein.

[1816] Protein Trophinin-associated protein (SEQ ID NO:462) is known or believed to have the following function(s): Could be involved with bystin and trophinin in a cell adhesion molecule complex that mediates an initial attachment of the blastocyst to uterine epithelial cells at the time of the embryo implantation. Protein Trophinin-associated protein (SEQ ID NO:462) localization is believed to be Cytoplasmic.

[1817] The following GO Annotation(s) apply to the previously known protein. The following annotation(s) were found: cell adhesion, which are annotation(s) related to Biological Process; and cytoplasm, which are annotation(s) related to Cellular Component.

[1818] PCT/IB2005/004037 and US Patent Application No. US 2006-0046257, filed on Jan. 27, 2005 and assigned to the applicant of the present invention, disclose protein sequence of T86235_P30 (SEQ ID NO:477) among other sequences of T86235 contig, and assays and methods of use thereof in the diagnosis of lung cancer. PCT/US05/03002 and U.S. patent application Ser. No. 11/051,646, filed on Jan. 27, 2005 and assigned to the applicant of the present invention, disclose polynucleotides of T86235 contig, and assays and methods of use thereof in the diagnosis using NAT based technologies. In this application the T86235 polynucleotides are described as being overexpressed in brain malignant tumors, epithelial malignant tumors, a mixture of malignant tumors from different tissues, skin malignancies and lung cancer.

[1819] In addition, the following proteins were previously disclosed by the inventors: T86235_P7, T86235_P11 and T86235_P26. T86235_P7 and T86235_P26 were disclosed in published PCT application no WO2004/096979, hereby incorporated by reference as if fully set forth herein. T86235_P11 was disclosed in published PCT application no WO2005/071058, hereby incorporated by reference as if fully set forth herein.

[1820] Unexpectedly, novel T86235 variant polynucleotides and their respective encoded polypeptides were identified and are now provided. The novel T86235 variants are now disclosed to be differentially expressed in breast cancer, ovarian cancer and lung cancer. Furthermore, the following variants have also been shown to have surprising new diagnostic utilities as they are now disclosed to be differentially expressed in breast cancer, ovarian cancer and lung cancer: T86235_P7 and T86235_P26. Surprisingly, T86235_P30 (SEQ ID NO:477) polypeptide and the known wild type T86235 polynucleotides and their respective encoded polypeptides are now disclosed to be differentially expressed in breast cancer and ovarian cancer, and therefore may be contemplated within the scope of the present invention as diagnostic markers for these diseases.

[1821] Cluster T86235 can be used as a diagnostic marker according to overexpression of transcripts of this cluster in cancer. Expression of such transcripts in normal tissues is also given according to the previously described methods. The term “number” in the left hand column of the table and the numbers on the y-axis of the FIG. 78 refer to weighted expression of ESTs in each category, as “parts per million” (ratio of the expression of ESTs for a particular cluster to the expression of all ESTs in that category, according to parts per million).

[1822] Overall, the following results were obtained as shown with regard to the histograms in FIG. 78 and Table 153. This cluster is overexpressed (at least at a minimum level) in the following pathological conditions: brain malignant tumors, a mixture of malignant tumors from different tissues, skin malignancies and epithelial malignant tumors.

TABLE 153
Normal tissue distribution

| Name of Tissue | Number |
|---|---|
| brain | 0 |
| ovary | 0 |
| bladder | 0 |
| lung | 1 |
| pancreas | 0 |
| liver | 0 |
| prostate | 0 |
| adrenal | 0 |
| general | 3 |
| bone marrow | 0 |
| skin | 0 |
| muscle | 1 |
| uterus | 4 |
| colon | 3 |
| kidney | 0 |
| lymph nodes | 26 |
| breast | 17 |
| stomach | 36 |
| epithelial | 2 |
| bone | 0 |

TABLE 154
P values and ratios for expression in cancerous tissue

| Name of Tissue | P1 | P2 | SP1 | R3 | SP2 | R4 |
|---|---|---|---|---|---|---|
| brain | 9.8e−03 | 7.0e−05 | 1.7e−05 | 18.5 | 1.2e−07 | 18.9 |
| ovary | 6.2e−01 | 4.2e−01 | 6.8e−01 | 1.5 | 4.5e−01 | 1.9 |
| bladder | 1.2e−01 | 1.8e−01 | 1.0e−01 | 4.1 | 2.1e−01 | 2.9 |
| lung | 4.6e−01 | 4.9e−01 | 4.1e−01 | 2.4 | 2.3e−01 | 2.7 |
| pancreas | 3.1e−01 | 4.2e−01 | 4.2e−01 | 2.4 | 5.3e−01 | 1.9 |
| liver | N/A | 6.9e−01 | N/A | N/A | 7.0e−01 | 1.4 |
| prostate | 5.0e−01 | 3.1e−01 | 4.5e−01 | 2.0 | 1.8e−01 | 2.7 |
| adrenal | 3.8e−01 | 4.3e−01 | 2.1e−01 | 3.4 | 2.8e−01 | 2.8 |
| general | 6.7e−08 | 5.2e−13 | 1.0e−11 | 8.1 | 8.8e−23 | 10.5 |
| bone marrow | 5.6e−01 | 3.3e−01 | N/A | N/A | 4.4e−02 | 4.6 |
| skin | 3.3e−01 | 4.3e−02 | N/A | N/A | 5.5e−04 | 4.9 |
| muscle | 9.2e−01 | 4.8e−01 | N/A | N/A | 4.0e−01 | 2.3 |
| uterus | 4.0e−01 | 2.2e−01 | 1.3e−01 | 2.5 | 8.5e−02 | 3.0 |
| colon | 2.2e−01 | 1.4e−01 | 4.8e−01 | 1.9 | 3.5e−01 | 2.1 |
| kidney | 3.3e−01 | 2.7e−01 | 5.8e−01 | 1.7 | 4.8e−01 | 1.9 |
| lymph nodes | 6.9e−01 | 5.0e−01 | 1.0e+00 | 0.8 | 1.3e−01 | 1.8 |
| breast | 9.5e−01 | 6.2e−01 | N/A | N/A | 5.6e−01 | 1.2 |
| stomach | 4.6e−01 | 5.5e−01 | 7.5e−01 | 1.0 | 8.1e−01 | 0.9 |
| epithelial | 5.8e−04 | 1.3e−05 | 3.0e−05 | 6.6 | 2.3e−09 | 8.7 |
| bone | N/A | 4.3e−01 | N/A | N/A | 4.9e−01 | 1.9 |

[1823] As noted above, cluster T86235 features 10 transcript(s), which were listed in Table 150 above. These transcript(s) encode for protein(s) which are variant(s) of protein Trophinin-associated protein (SEQ ID NO:462). A description of each variant protein according to the present invention is now provided.

[1824] Variant protein T86235_P4 (SEQ ID NO:469) according to the present invention has an amino acid sequence encoded by transcript(s) T86235_T13 (SEQ ID NO:444) and T86235_T15 (SEQ ID NO:445). One or more alignments to one or more previously published protein sequences are given in the alignment table in the attached CDROM. A brief description of the relationship of the variant protein according to the present invention to each such aligned protein is as follows:

1. Comparison Report Between T86235_P4 (SEQ ID NO:469) and known protein(s) TAST_HUMAN (SEQ ID NO: 463):

[1825] A. An isolated chimeric polypeptide encoding for T86235_P4 (SEQ ID NO:469), comprising a first amino acid sequence being at least about 90% homologous to MTTRQATKDPLLRGVSPTPSKIPVRSQKRTPFPTVTSCAVDQENQDPRRWVQKPPLNIQRPLVDSAGPRPK ARHQAETSQRLVGISQPRNPLEELRPSPRGQNVGPGPPAQTEAPGTIEFVADPAALATILSGEGVKSCHLGR QPSLAKRVLVRGSQGGTTQRVQGVRASAYLAPRTPTHRLDPARASCFSRLEGPGPRGRTLCPQRLQALISP SGPSFHPST corresponding to amino acids 1-223 of known protein(s) TAST_HUMAN (SEQ ID NO: 463), which also corresponds to amino acids 1-223 of T86235_P4 (SEQ ID NO:469), a bridging amino acid R corresponding to amino acid 224 of T86235_P4 (SEQ ID NO:469), a second amino acid sequence being at least about 90% homologous to PSFQELRRETAGSSRTSVSQASGLLLETPVQPAFSLPKGEREVVTHSDEGGVASLGLAQRVPLRENREMSH TRDSHDSHLMPSPAPVAQPLPGHVVPCPSPFGRAQRVPSPGPPTLTSYSVLRRLTVQPKTRFTPMPSTPRVQ QAQWLRGVSPQSCSEDPALPW corresponding to amino acids 225-388 of known protein(s) TAST_HUMAN (SEQ ID NO: 463), which also corresponds to amino acids 225-388 of T86235_P4 (SEQ ID NO:469), and a third amino acid sequence being at least about 70%, optionally at least 80%, preferably at least 85%, more preferably at least 90% and most preferably at least 95% homologous to a polypeptide having the sequence VSIRSFPLLRSLALCCQPGGPGV (SEQ ID NO: 510) corresponding to amino acids 389-411 of T86235_P4 (SEQ ID NO:469), wherein said first amino acid sequence, bridging amino acid, second amino acid sequence and third amino acid sequence are contiguous and in a sequential order.

[1826] B. An isolated polypeptide encoding for an edge portion of T86235_P4 (SEQ ID NO:469), comprising an amino acid sequence being at least about 70%, optionally at least about 80%, preferably at least about 85%, more preferably at least about 90% and most preferably at least about 95% homologous to the sequence VSIRSFPLLRSLALCCQPGGPGV (SEQ ID NO: 510) of T86235_P4 (SEQ ID NO:469).

2. Comparison Report Between T86235_P4 (SEQ ID NO:469) and known protein(s) Q8N5B2_HUMAN (SEQ ID NO: 467):

[1827] A. An isolated chimeric polypeptide encoding for T86235_P4 (SEQ ID NO:469), comprising a first amino acid sequence being at least about 90% homologous to MTTRQATKDPLLRGVSPTPSKIPVRSQKRTPFPTVTSCAVDQENQDPRRWVQKPPLNIQRPLVDSAGPRPK ARHQAETSQRLVGISQPRNPLEELRPSPRGQNVGPGPPAQTEAPGTIEFVADPAALATILSGEGVKSCHLGR QPSLAKRVLVRGSQGGTTQRVQGVRASAYLAPRTPTHRLDPARASCFSRLEGPGPRGRTLCPQRLQALISP SGPSFHPSTRPSFQELRRETAGSSRTSVSQASGLLLETPVQPAFSLPKGEREVVTHSDEGGVASLGLAQRVP LRENREMSHTRDSHDSHLMPSPAPVAQPLPGHVVPCPSPFGRAQRVPSPGPPTLTSYSVLRRLTVQPKTRFT PMPSTPRVQQAQWLRGVSPQSCSEDPALPW corresponding to amino acids 1-388 of known protein(s) Q8N5B2_HUMAN (SEQ ID NO: 467), which also corresponds to amino acids 1-388 of T86235_P4 (SEQ ID NO:469), and a second amino acid sequence being at least about 70%, optionally at least 80%, preferably at least 85%, more preferably at least 90% and most preferably at least 95% homologous to a polypeptide having the sequence VSIRSFPLLRSLALCCQPGGPGV (SEQ ID NO: 510) corresponding to amino acids 389-411 of T86235_P4 (SEQ ID NO:469), wherein said first amino acid sequence and second amino acid sequence are contiguous and in a sequential order.

3. Comparison Report Between T86235_P4 (SEQ ID NO:469) and known protein(s) Q6PJU7_HUMAN (SEQ ID NO: 439):

[1828] A. An isolated chimeric polypeptide encoding for T86235_P4 (SEQ ID NO:469), comprising a first amino acid sequence being at least about 90% homologous to MTTRQATKDPLLRGVSPTPSKIPVRSQKRTPFPTVTSCAVDQENQDPRRWVQKPPLNIQRPLVDSAGPRPK ARHQAETSQRLVGISQPRNPLEELRPSPRGQNVGPGPPAQT corresponding to amino acids 1-112 of known protein(s) Q6PJU7_HUMAN (SEQ ID NO: 439), which also corresponds to amino acids 1-112 of T86235_P4 (SEQ ID NO:469), and a second amino acid sequence being at least about 70%, optionally at least 80%, preferably at least 85%, more preferably at least 90% and most preferably at least 95% homologous to a polypeptide having the sequence EAPGTIEFVADPAALATILSGEGVKSCHLGRQPSLAKRVLVRGSQGGTTQRVQGVRASAYLAPRTP THRLDPARASCFSRLEGPGPRGRTLCPQRLQALISPSGPSFHPSTRPSFQELRRETAGSSRTSVSQASGLLLET PVQPAFSLPKGEREVVTHSDEGGVASLGLAQRVPLRENREMSHTRDSHDSHLMPSPAPVAQPLPGHVVPC PSPFGRAQRVPSPGPPTLTSYSVLRRLTVQPKTRFTPMPSTPRVQQAQWLRGVSPQSCSEDPALPWVSIRSF PLLRSLALCCQPGGPGV (SEQ ID NO: 511) corresponding to amino acids 113-411 of T86235_P4 (SEQ ID NO:469), wherein said first amino acid sequence and second amino acid sequence are contiguous and in a sequential order.

[1829] B. An isolated polypeptide encoding for an edge portion of T86235_P4 (SEQ ID NO:469), comprising an amino acid sequence being at least about 70%, optionally at least about 80%, preferably at least about 85%, more preferably at least about 90% and most preferably at least about 95% homologous to the sequence EAPGTIEFVADPAALATILSGEGVKSCHLGRQPSLAKRVLVRGSQGGTTQRVQGVRASAYLAPRTPTHRLD PARASCFSRLEGPGPRGRTLCPQRLQALISPSGPSFHPSTRPSFQELRRETAGSSRTSVSQASGLLLETPVQPA FSLPKGEREVVTHSDEGGVASLGLAQRVPLRENREMSHTRDSHDSHLMPSPAPVAQPLPGHVVPCPSPFGR AQRVPSPGPPTLTSYSVLRRLTVQPKTRFTPMPSTPRVQQAQWLRGVSPQSCSEDPALPWVSIRSFPLLRSL ALCCQPGGPGV (SEQ ID NO: 511) of T86235_P4 (SEQ ID NO:469).

[1830] The localization of the variant protein was determined according to results from a number of different software programs and analyses, including analyses from SignalP and other specialized programs. The variant protein is believed to be located intracellularly with regard to the cell.

[1831] Variant protein T86235_P4 (SEQ ID NO:469) also has the following non-silent SNPs (Single Nucleotide Polymorphisms) as listed in Table 155, (given according to their position(s) on the amino acid sequence, with the alternative amino acid(s) listed).

TABLE 155
Amino acid mutations

| SNP position(s) on amino acid | |
|---|---|
| sequence | Alternative amino acid(s) |
| 82 | L -> |
| 116 | G -> |
| 120 | F -> |
| 165 | Q -> |
| 242 | V -> A |
| 293 | M -> V |
| 333 | P -> L |

[1832] Variant protein T86235_P4 (SEQ ID NO:469) is encoded by the following transcript(s): T86235_T13 (SEQ ID NO:444) and T86235—T15 (SEQ ID NO:445), for which the sequences are given.

[1833] The coding portion of transcript T86235_T13 (SEQ ID NO:444) starts at position 298 and ends at position 1530. The transcript also has the following SNPs as listed in Table 156 (given according to their position on the nucleotide sequence, with the alternative nucleic acid listed).

TABLE 156
Nucleic acid SNPs

| Polymorphism | SNP position(s) on nucleotide sequence |
|---|---|
| G -> | 240, 643, 792, 2864 |
| G -> A | 360, 1805, 2259, 3127 |
| A -> C | 439 |
| T -> | 541, 655, 2527 |
| C -> T | 909, 1272, 1295, 1374, 1874 |
| T -> C | 1022, 2445 |
| A -> G | 1174, 1911, 2187, 2536 |
| C -> G | 1660, 2126 |
| C -> | 2710 |

[1834] The coding portion of transcript T86235_T15 (SEQ ID NO:445) starts at position 298 and ends at position 1530. The transcript also has the following SNPs as listed in Table 157 (given according to their position on the nucleotide sequence, with the alternative nucleic acid listed).

TABLE 157
Nucleic acid SNPs

| Polymorphism | SNP position(s) on nucleotide sequence |
|---|---|
| G -> | 240, 643, 792, 3068 |
| G -> A | 360, 1805, 2106, 3331 |
| A -> C | 439, 3026 |
| T -> | 541, 655, 2374 |
| C -> T | 909, 1272, 1295, 1374, 1874 |
| T -> C | 1022, 2292 |
| A -> G | 1174, 1911, 2034, 2383 |
| C -> G | 1660 |
| C -> | 2644 |

[1835] Variant protein T86235_P5 (SEQ ID NO:470) according to the present invention has an amino acid sequence encoded by transcript T86235_T5 (SEQ ID NO:440). An alignment is given to the known protein (Trophinin-associated protein, SEQ ID NO:462-468) at the end of the application. One or more alignments to one or more previously published protein sequences are given in the alignment table on the attached CDROM. A brief description of the relationship of the variant protein according to the present invention to each such aligned protein is as follows:

1. Comparison Report Between T86235_P5 (SEQ ID NO:470) and known protein(s) TAST_HUMAN (SEQ ID NO: 463):

[1836] A. An isolated chimeric polypeptide encoding for T86235_P5 (SEQ ID NO:470), comprising a first amino acid sequence being at least about 90% homologous to MTTRQATKDPLLRGVSPTPSKIPVRSQKRTPFPTVTSCAVDQENQDPRRWVQKPPLNIQRPLVDSAGPRPK ARHQAETSQRLVGISQPRNPLEELRPSPRGQNVGPGPPAQTEAPGTIEFVADPAALATILSGEGVKSCHLGR QPSLAKRVLVRGSQGGTTQRVQGVRASAYLAPRTPTBRLDPARASCFSRLEGPGPRGRTLCPQRLQALISP SGPSFHPST corresponding to amino acids 1-223 of known protein(s) TAST_HUMAN (SEQ ID NO: 463), which also corresponds to amino acids 1-223 of T86235_P5 (SEQ ID NO:470), a bridging amino acid R corresponding to amino acid 224 of T86235_P5 (SEQ ID NO:470), a second amino acid sequence being at least about 90% homologous to

PSFQELRRETAGSSRTSVSQASGLLLETPVQPAFSLPKGEREVVTHSDEG
GVASLGLAQRVPLRENREMSHTRDSHDSHLMPSPAPVAQPLPGHVVPCPS
PFGRAQRVPSPGPPTLTSYSVLRRLTVQPKTRFTPMPSTPRVQQAQWLRG
VSPQSCSEDPALPWEQVAVRLFDQESCIRSLEGSGKPPVATPSGPHSNRT
PSLQEVKIQ

corresponding to amino acids 225-433 of known protein(s) TAST_HUMAN (SEQ ID NO: 463), which also corresponds to amino acids 225-433 of T86235_P5 (SEQ ID NO:470), and a third amino acid sequence being at least about 70%, optionally at least 80%, preferably at least 85%, more preferably at least 90% and most preferably at least 95% homologous to a polypeptide having the sequence VSLCGQQL (SEQ ID NO: 512) corresponding to amino acids 434-441 of T86235_P5 (SEQ ID NO:470), wherein said first amino acid sequence, bridging amino acid, second amino acid sequence and third amino acid sequence are contiguous and in a sequential order.

[1837] B. An isolated polypeptide encoding for an edge portion of T86235_P5 (SEQ ID NO:470), comprising an amino acid sequence being at least about 70%, optionally at least about 80%, preferably at least about 85%, more preferably at least about 90% and most preferably at least about 95% homologous to the sequence VSLCGQQL (SEQ ID NO: 512) of T86235_P5 (SEQ ID NO:470).

2. Comparison Report Between T86235_P5 (SEQ ID NO:470) and known protein(s) Q8N5B2_HUMAN (SEQ ID NO: 467):

[1838] A. An isolated chimeric polypeptide encoding for T86235_P5 (SEQ ID NO:470), comprising a first amino acid sequence being at least about 90% homologous to MTTRQATKDPLLRGVSPTPSKIPVRSQKRTPFPTVTSCAVDQENQDPRRWVQKPPLNIQRPLVDSAGPRPK ARHQAETSQRLVGISQPRNPLEELRPSPRGQNVGPGPPAQTEAPGTIEFVADPAALATILSGEGVKSCHLGR QPSLAKRVLVRGSQGGTTQRVQGVRASAYLAPRTPTHRLDPARASCFSRLEGPGPRGRTLCPQRLQALISP SGPSFHPSTRPSFQELRRETAGSSRTSVSQASGLLLETPVQPAFSLPKGEREVVTHSDEGGVASLGLAQRVP LRENREMSHTRDSHDSHLMPSPAPVAQPLPGHVVPCPSPFGRAQRVPSPGPPTLTSYSVLRRLTVQPKTRFT PMPSTPRVQQAQWLRGVSPQSCSEDPALPWEQVAVRLFDQESCIRSLEGSGKPPVATPSGPHSNRTPSLQE VKIQ corresponding to amino acids 1-433 of known protein(s) Q8N5B2_HUMAN (SEQ ID NO: 467), which also corresponds to amino acids 1-433 of T86235_P5 (SEQ ID NO:470), and a second amino acid sequence being at least about 70%, optionally at least 80%, preferably at least 85%, more preferably at least 90% and most preferably at least 95% homologous to a polypeptide having the sequence VSLCGQQL (SEQ ID NO: 512) corresponding to amino acids 434-441 of T86235_P5 (SEQ ID NO:470), wherein said first amino acid sequence and second amino acid sequence are contiguous and in a sequential order.

3. Comparison Report Between T86235_P5 (SEQ ID NO:470) and known protein(s) Q6PJU7_HUMAN (SEQ ID NO: 439):

[1839] A. An isolated chimeric polypeptide encoding for T86235_P5 (SEQ ID NO:470), comprising a first amino acid sequence being at least about 90% homologous to MTTRQATKDPLLRGVSPTPSKIPVRSQKRTPFPTVTSCAVDQENQDPRRWVQKPPLNIQRPLVDSAGPRPK ARHQAETSQRLVGISQPRNPLEELRPSPRGQNVGPGPPAQT corresponding to amino acids 1-112 of known protein(s) Q6PJU7_HUMAN (SEQ ID NO: 439), which also corresponds to amino acids 1-112 of T86235_P5 (SEQ ID NO:470), and a second amino acid sequence being at least about 70%, optionally at least 80%, preferably at least 85%, more preferably at least 90% and most preferably at least 95% homologous to a polypeptide having the sequence EAPGTIEFVADPAALATILSGEGVKSCJHLGRQPSLAKRVLVRGSQGGTTQRVQGVRASAYLAPRTPTHRLD PARASCFSRLEGPGPRGRTLCPQRLQALISPSGPSFHPSTRPSFQELRRETAGSSRTSVSQASGLLLETPVQPA FSLPKGEREVVTHSDEGGVASLGLAQRVPLRENREMSHTRDSHDSHLMPSPAPVAQPLPGHVVPCPSPFGR AQRVPSPGPPTLTSYSVLRRLTVQPKTRFTPMPSTPRVQQAQWLRGVSPQSCSEDPALPWEQVAVRLFDQE SCIRSLEGSGKPPVATPSGPHSNRTPSLQEVKIQVSLCGQQL (SEQ ID NO: 513) corresponding to amino acids 113-441 of T86235_P5 (SEQ ID NO:470), wherein said first amino acid sequence and second amino acid sequence are contiguous and in a sequential order.

[1840] B. An isolated polypeptide encoding for an edge portion of T86235_P5 (SEQ ID NO:470), comprising an amino acid sequence being at least about 70%, optionally at least about 80%, preferably at least about 85%, more preferably at least about 90% and most preferably at least about 95% homologous to the sequence

(SEQ ID NO: 513)

EAPGTIEFVADPAALATILSGEGVKSCHLGRQPSLAKRVLVRGSQGGTTQ
RVQGVRASAYLAPRTPTHRLDPARASCFSRLEGPGPRGRTLCPQRLQALI
SPSGPSFHPSTRPSFQELRRETAGSSRTSVSQASGLLLETPVQPAFSLPK
GEREVVTHSDEGGVASLGLAQRVPLRENREMSHTRDSHDSHLMPSPAPVA
QPLPGHVVPCPSPFGRAQRVPSPGPPTLTSYSVLRRLTVQPKTRFTPMPS
TPRVQQAQWLRGVSPQSCSEDPALPWEQVAVRLFDQESCIRSLEGSGKPP
VATPSGPHSNRTPSLQEVKIQVSLCGQQL
of

(SEQ ID NO: 470)

T86235_P5.

[1841] The localization of the variant protein was determined according to results from a number of different software programs and analyses, including analyses from SignalP and other specialized programs. The variant protein is believed to be located intracellularly with regard to the cell.

[1842] Variant protein T86235_P5 (SEQ ID NO:470) also has the following non-silent SNPs (Single Nucleotide Polymorphisms) as listed in Table 158, (given according to their position(s) on the amino acid sequence, with the alternative amino acid(s) listed).

TABLE 158
Amino acid mutations

| SNP position(s) on amino acid | |
|---|---|
| sequence | Alternative amino acid(s) |
| 82 | L -> |
| 116 | G -> |
| 120 | F -> |
| 165 | Q -> |
| 242 | V -> A |
| 293 | M -> V |
| 333 | P -> L |
| 392 | A -> V |

[1843] Variant protein T86235_P5 (SEQ ID NO:470) is encoded by the following transcript(s): T86235_T5 (SEQ ID NO:440), for which the coding portion of transcript T86235_T5 (SEQ ID NO:440) starts at position 298 and ends at position 1620. The transcript also has the following SNPs as listed in Table 159 (given according to their position on the nucleotide sequence, with the alternative nucleic acid listed).

TABLE 159
Nucleic acid SNPs

| Polymorphism | SNP position(s) on nucleotide sequence |
|---|---|
| G -> | 240, 643, 792, 2462 |
| G -> A | 360, 1857, 2725 |
| A -> C | 439 |
| T -> | 541, 655, 2125 |
| C -> T | 909, 1272, 1295, 1374, 1472 |
| T -> C | 1022, 2043 |
| A -> G | 1174, 1509, 1785, 2134 |
| C -> G | 1724 |
| C -> | 2308 |

[1844] Variant protein T86235_P6 (SEQ ID NO:471) according to the present invention has an amino acid sequence encoded by transcript(s) T86235_T6 (SEQ ID NO:441). One or more alignments to one or more previously published protein sequences are given in the alignment table on the attached CDROM. A brief description of the relationship of the variant protein according to the present invention to each such aligned protein is as follows:

1. Comparison Report Between T86235_P6 (SEQ ID NO:471) and known protein(s) TAST_HUMAN (SEQ ID NO: 463):

[1845] A. An isolated chimeric polypeptide encoding for T86235_P6 (SEQ ID NO:471), comprising a first amino acid sequence being at least about 90% homologous to MTTRQATKDPLLRGVSPTPSKIPVRSQKRTPFPTVTSCAVDQENQDPRRWVQKPPLNIQRPLVDSAGPRPK ARHQAETSQRLVGISQPRNPLEELRPSPRGQNVGPGPPAQTEAPGTIEFVADPAALATILSGEGVKSCHLGR QPSLAKRVLVRGSQGGTTQRVQGVRASAYLAPRTPTBRLDPARASCFSRLEGPGPRGRTLCPQRLQALISP SGPSFHPST corresponding to amino acids 1-223 of known protein(s) TAST_HUMAN (SEQ ID NO: 463), which also corresponds to amino acids 1-223 of T86235_P6 (SEQ ID NO:471), a bridging amino acid R corresponding to amino acid 224 of T86235_P6 (SEQ ID NO:471), a second amino acid sequence being at least about 90% homologous to PSFQELRRETAGSSRTSVSQASGLLLETPVQPAFSLPKGEREVVTHSDEGGVASLGLAQRVPLRENREMSH TRDSHDSHLMPSPAPVAQPLPGHVVPCPSPFGRAQRVPSPGPPTLTSYSVLRRLTVQPKTRFTPMPSTPRVQ QAQWLRGVSPQSCSEDPALPWEQVAVRLFDQESCIRSLEGSGKPPVATPSGPHSNRTPSLQEVKIQRIGILQ QLLRQEVEGLVGGQCVPLNGGSSLDMVELQPLLTEISRTLNATEHNSGTSHLPGLLKHSGLPKPCLPEECG EPQPCPPAEPGPPEAFCRSEPEIPEPSLQEQLEVPEPYPPAEPRPLESCCRSEPEIPESSRQEQLE corresponding to amino acids 225-576 of known protein(s) TAST_HUMAN (SEQ ID NO: 463), which also corresponds to amino acids 225-576 of T86235_P6 (SEQ ID NO:471), a third amino acid sequence being at least about 90% homologous to EQLEVPEPCPPAEPGPLQPSTQGQSGPPGPCPRVELGASEPCTLEHRSLESSLPPCCSQWAPATTSLIFSSQHP LCASPPICSLQSLRPPAGQA corresponding to amino acids 606-699 of known protein(s) TAST_HUMAN (SEQ ID NO: 463) which also corresponds to amino acids 577-670 of T86235_P6 (SEQ ID NO:471), a fourth amino acid sequence being at least about 70%, optionally at least 80%, preferably at least 85%, more preferably at least 90% and most preferably at least 95% homologous to a polypeptide having the sequence GKELAGKECEHKRSSPHCELHTCPAPTPGNLMLPHLPPWPSLALPQEEGRGCTSSPVLLIGLAVGGGGGED STWWKYRTPDLPLNFPCPS (SEQ ID NO: 514) corresponding to amino acids 671-760 of T86235_P6 (SEQ ID NO:471), and a fifth amino acid sequence being at least about 90% homologous to GLSNLAPRTLALRERLKSCLTAIHCFHEARLDDECAFYTSRAPPSGP_RVCTNPVATLLEWQDALCFIPVGS AAPQGSP corresponding to amino acids 700-778 of known protein(s) TAST_HUMAN (SEQ ID NO: 463), which also corresponds to amino acids 761-839 of T86235_P6 (SEQ ID NO:471), wherein said first amino acid sequence, bridging amino acid, second amino acid sequence, third amino acid sequence, fourth amino acid sequence and fifth amino acid sequence are contiguous and in a sequential order.

[1846] B. An isolated chimeric polypeptide encoding for an edge portion of T86235_P6 (SEQ ID NO:471), comprising a polypeptide having a length “n”, wherein n is at least about 10 amino acids in length, optionally at least about 20 amino acids in length, preferably at least about 30 amino acids in length, more preferably at least about 40 amino acids in length and most preferably at least about 50 amino acids in length, wherein at least two amino acids comprise EE, having a structure as follows: a sequence starting from any of amino acid numbers 576−x to 576; and ending at any of amino acid numbers 577+((n−2)−x), in which x varies from 0 to n−2.

2. Comparison Report Between T86235_P6 (SEQ ID NO:471) and known protein(s) Q8N5B2_HUMAN (SEQ ID NO: 467):

[1847] A. An isolated chimeric polypeptide encoding for T86235_P6 (SEQ ID NO:471), comprising a first amino acid sequence being at least about 90% homologous to

MTTRQATKDPLLRGVSPTPSKIPVRSQKRTPFPTVTSCAVDQENQDPRRW
VQKPPLNIQRPLVDSAGPRPKAHQAETSQRLVGISQPRNPLEELRPSPRG
QNVGPGPPAQTEAPGTIEFVADPAALATILSGEGVKSCHLGRQPSLAKRV
LVRGSQGGTTQRVQGVRASAYLAPRTPTHRLDPARASCFSRLEGPGPRGR
TLCPQRLQALISPSGPSFHPSTRPSFQELRRETAGSSRTSVSQASGLLLE
TPVQPAFSLPKGEREVVTHSDEGGVASLGLAQRVPLRENREMSHTRDSHD
SHLMSPAPVAQPLPGHVVPCPSPFGRAQRVPSPGPPTLTSYSVLRRLTVQ
PKTRFTPMPSTPRVQQAQWLRGVSPQSCSEDPALPWEQVAVRLFDQESCI
RSLEGSGKPPVATPSGPHSNRTPSLQEVKIQRIGILQQLLRQEVEGLVGG
QCVPLNGGSSLDMVELQPLLTEISRTLNATEHNSGTSHLPGLLKHSGLPK
PCLPEECGEPQPCPPAEPGPPEAFCRSEPEIPEPSLQEQLEVPEPYPPAE
PRPLESCCRSEPEIPESSRQEQLE

corresponding to amino acids 1-576 of known protein(s) Q8N5B2_HUMAN (SEQ ID NO: 467), which also corresponds to amino acids 1-576 of T86235_P6 (SEQ ID NO:471), a second amino acid sequence being at least about 90% homologous to EQLEVPEPCPPAEPGPLQPSTQGQSGPPGPCPRVELGASEPCTLEHRSLESSLPPCCSQWAPATTSLIFSSQHP LCASPPICSLQSLRPPAGQA corresponding to amino acids 606-699 of known protein(s) Q8N5B2_HUMAN (SEQ ID NO: 467), which also corresponds to amino acids 577-670 of T86235_P6 (SEQ ID NO:471), a third amino acid sequence being at least about 70%, optionally at least 80%, preferably at least 85%, more preferably at least 90% and most preferably at least 95% homologous to a polypeptide having the sequence GKELAGKECEHKRSSPHCELHTCPAPTPGNLMLPHLPPWPSLALPQEEGRGCTSSPVLLIGLAVGGGGGED STWWKYRTPDLPLNFPCPS (SEQ ID NO: 514) corresponding to amino acids 671-760 of T86235_P6 (SEQ ID NO:471), and a fourth amino acid sequence being at least about 90% homologous to GLSNLAPRTLALRERLKSCLTAIHCFHEARLDDECAFYTSRAPPSGPTRVCTNPVATLLEWQDALCFIPVGS APQGSP corresponding to amino acids 700-778 of known protein(s) Q8N5B2_HUMAN (SEQ ID NO: 467), which also corresponds to amino acids 761-839 of T86235_P6 (SEQ ID NO:471), wherein said first amino acid sequence, second amino acid sequence, third amino acid sequence and fourth amino acid sequence are contiguous and in a sequential order.

[1848] B. An isolated chimeric polypeptide encoding for an edge portion of T86235_P6 (SEQ ID NO:471), comprising a polypeptide having a length “n”, wherein n is at least about 10 amino acids in length, optionally at least about 20 amino acids in length, preferably at least about 30 amino acids in length, more preferably at least about 40 amino acids in length and most preferably at least about 50 amino acids in length, wherein at least two amino acids comprise EE, having a structure as follows: a sequence starting from any of amino acid numbers 576−x to 576; and ending at any of amino acid numbers 577+((n−2)−x), in which x varies from 0 to n−2.

[1849] C. An isolated polypeptide encoding for an edge portion of T86235_P6 (SEQ ID NO:471), comprising an amino acid sequence being at least about 70%, optionally at least about 80%, preferably at least about 85%, more preferably at least about 90% and most preferably at least about 95% homologous to the sequence

(SEQ ID NO: 514)

GKELAGKECEHKRSSPHCELHTCPAPTPGNLMLPHLPPWPSLALPQEEGR
GCTSSPVLLIGLAVGGGGGEDSTWWKYRTPDLPLNFPCPS
of

(SEQ ID NO: 471)

T86235_P6.

3. Comparison Report Between T86235_P6 (SEQ ID NO:471) and known protein(s) Q6PJU7_HUMAN (SEQ ID NO: 439):

[1850] A. An isolated chimeric polypeptide encoding for T86235_P6 (SEQ ID NO:471), comprising a first amino acid sequence being at least about 90% homologous to MTTRQATKDPLLRGVSPTPSKIPVRSQKRTPFPTVTSCAVDQENQDPRRWVQKPPLNIQRPLVDSAGPRPK ARHQAETSQRLVGISQPRNPLEELRPSPRGQNVGPGPPAQT corresponding to amino acids 1-112 of known protein(s) Q6PJU7_HUMAN (SEQ ID NO: 439), which also corresponds to amino acids 1-112 of T86235_P6 (SEQ ID NO:471), and a second amino acid sequence being at least about 70%, optionally at least 80%, preferably at least 85%, more preferably at least 90% and most preferably at least 95% homologous to a polypeptide having the sequence EAPGTIEFVADPAALATILSGEGVKSCHLGRQPSLAKRVLVRGSQGGTTQRVQGVRASAYLAPRTPTBRLD PARASCFSRLEGPGPRGRTLCPQRLQALISPSGPSFHPSTRPSFQELRRETAGSSRTSVSQASGLLLETPVQPA FSLPKGEREVVTHSDEGGVASLGLAQRVPLRENREMSHTRDSHDSHLMPSPAPVAQPLPGIIVVPCPSPFGR AQRVPSPGPPTLTSYSVLRRLTVQPKTRFTPMPSTPRVQQAQWLRGVSPQSCSEDPALPWEQVAVRLFDQE SCIRSLEGSGKPPVATPSGPHSNRTPSLQEVKIQRIGILQQLLRQEVEGLVGGQCVPLNGGSSLDMVELQPL LTEISRTLNATEHNSGTSHLPGLLKHSGLPKPCLPEECGEPQPCPPAEPGPPEAFCRSEPEIPEPSLQEQLEVP EPYPPAEPRPLESCCRSEPEIPESSRQEQLEEQLEVPEPCPPAEPGPLQPSTQGQSGPPGPCPRVELGASEPCT LEHRSLESSLPPCCSQWAPATTSLIFSSQHPLCASPPICSLQSLRPPAGQAGKELAGKECEHKRSSPHCELHT CPAPTPGNLMLPHLPPWPSLALPQEEGRGCTSSPVLLIGLAVGGGGGEDSTWWKYRTPDLPLNFPCPSGLS NLAPRTLALRERLKSCLTAIHCFHEARLDDECAFYTSRAPPSGPTRVCTNPVATLLEWQDALCFIPVGSAAP QGSP (SEQ ID NO: 515) corresponding to amino acids 113-839 of T86235_P6 (SEQ ID NO:471), wherein said first amino acid sequence and second amino acid sequence are contiguous and in a sequential order.

[1851] B. An isolated polypeptide encoding for an edge portion of T86235_P6 (SEQ ID NO:471), comprising an amino acid sequence being at least about 70%, optionally at least about 80%, preferably at least about 85%, more preferably at least about 90% and most preferably at least about 95% homologous to the sequence

(SEQ ID NO: 515)

EAPGTIEFVADPAALATILSGEGVKSCHLGRQPSLAKRVLVRGSQGGTTQ
RVQGVRASAYLAPRTPTHRLDPARASCFSRLEGPGPRGRTLCPQRLQALI
SPSGPSFHPSTRPSFQELRRETAGSSRTSVSQASGLLLETPVQPAFSLPK
GEREVVTHSDEGGVASLGLAQRVPLRENREMSHTRDSHDSHLMPSPAPVA
QPLPGHVVPCPSPFGRAQRVPSPGPPTLTSYSVLRRLTVQPKTRFTPMPS
TPRVQQAQWLRGVSPQSCSEDPALPWEQVAVRLFDQESCIRSLEGSGKPP
VATPSGPHSNRTPSLQEVKIQRIGILQQLLRQEVEGLVGGQCVPLNGGSS
LDMVELQPLLTEISRTLNATEHNSGTSHLPGLLKHSGLPKPCLPEECGEP
QPCPPAEPGPPEAFCRSEPELPEPSLQEQLEVPEPYPPAEPRPLESGCRS
EPEIPESSRQEQLEEQLEVPEPCPPAEPGPLQPSTQGQSGPPGPCPRVEL
GASEPCTLEHRSLESSLPPCCSQWAPATTSLLFSSQHPLCASPPICSLQS
LRPPAGQAGKELAGKEGEHKRSSPHCELHTCPAPTPGNLMLPHLPPWPSL
ALPQEEGRGCTSSPVLLIGLAVGGGGGEDSTWWKYRTPDLPLNFPCPSGL
SNLAPRTLALRERLKSCLTAIHCFHEARILDDECAFYTSRAPPSGPTRVC
TNPVATLLEWQDALCFIPVGSAAPQGSP
of

(SEQ ID NO: 471)

T86235_P6.

[1852] The localization of the variant protein was determined according to results from a number of different software programs and analyses, including analyses from SignalP and other specialized programs. The variant protein is believed to be located intracellularly with regard to the cell.

[1853] Variant protein T86235_P6 (SEQ ID NO:471) also has the following non-silent SNPs (Single Nucleotide Polymorphisms) as listed in Table 160, (given according to their position(s) on the amino acid sequence, with the alternative amino acid(s) listed).

TABLE 160
Amino acid mutations

| SNP position(s) on amino acid | |
|---|---|
| sequence | Alternative amino acid(s) |
| 82 | L -> |
| 116 | G -> |
| 120 | F -> |
| 165 | Q -> |
| 242 | V -> A |
| 293 | M -> V |
| 333 | P -> L |
| 392 | A -> V |
| 559 | C -> |
| 562 | S -> G |
| 620 | L -> |
| 747 | Y -> S |
| 761 | G -> |

[1854] Variant protein T86235_P6 (SEQ ID NO:471) is encoded by the following transcript(s): T86235_T6 (SEQ ID NO:441), for which the coding portion starts at position 298 and ends at position 2814. The transcript also has the following SNPs as listed in Table 161 (given according to their position on the nucleotide sequence, with the alternative nucleic acid listed).

TABLE 161
Nucleic acid SNPs

| Polymorphism | SNP position(s) on nucleotide sequence |
|---|---|
| G -> | 240, 643, 792, 2579 |
| G -> A | 360, 1704, 2842 |
| A -> C | 439, 2537 |
| T -> | 541, 655, 1972 |
| C -> T | 909, 1272, 1295, 1374, 1472 |
| T -> C | 1022, 1890 |
| A -> G | 1174, 1509, 1632, 1981 |
| C -> | 2155 |

[1855] Variant protein T86235_P7 (SEQ ID NO:472) according to the present invention has an amino acid sequence encoded by transcript(s) T86235_T7 (SEQ ID NO:442). One or more alignments to one or more previously published protein sequences are given in the alignment table on the attached CDROM. A brief description of the relationship of the variant protein according to the present invention to each such aligned protein is as follows:

1. Comparison Report Between T86235_P7 (SEQ ID NO:472) and known protein(s) TAST_HUMAN (SEQ ID NO: 463):

[1856] A. An isolated chimeric polypeptide encoding for T86235_P7 (SEQ ID NO:472), comprising a first amino acid sequence being at least about 90% homologous to MTTRQATKDPLLRGVSPTPSKIPVRSQKRTPFPTVTSCAVDQENQDPRRWVQKPPLNIQRPLVDSAGPRPK ARHQAETSQRLVGISQPRNPLEELRPSPRGQNVGPGPPAQTEAPGTIEFVADPAALATILSGEGVKSCHLGR QPSLAKRVLVRGSQGGTTQRVQGVRASAYLAPRTPTHRLDPARASCFSRLEGPGPRGRTLCPQRLQALISP SGPSFHPST corresponding to amino acids 1-223 of known protein(s) TAST_HUMAN (SEQ ID NO: 463), which also corresponds to amino acids 1-223 of T86235_P7 (SEQ ID NO:472), a bridging amino acid R corresponding to amino acid 224 of T86235_P7 (SEQ ID NO:472), a second amino acid sequence being at least about 90% homologous to PSFQELRRETAGSSRTSVSQASGLLLETPVQPAFSLPKGEREVVTHSDEGGVASLGLAQRVPLRENREMSH TRDSHDSHLMPSPAPVAQPLPGHVVPCPSPFGRAQRVPSPGPPTLTSYSVLRRLTVQPKTRFTPMPSTPRVQ QAQWLRGVSPQSCSEDPALPWEQVAVRLFDQESCIRSLEGSGKPPVATPSGPHSNRTPSLQEVKIQRIGILQ QLLRQEVEGLVGGQCVPLNGGSSLDMVELQPLLTEISRTLNATEHNSGTSHLPGLLKHSGLPKPCLPEECG EPQPCPPAEPGPPEAFCRSEPEIPEPSLQEQLEVPEPYPPAEPRPLESCCRSEPEIPESSRQEQLEVPEPCPPAEP RPLESYCRIEPEIPESSRQEQLEVPEPCPPAEPGPLQPSTQGQSGPPGPCPRVELGASEPCTLEHRSLESSLPPC CSQWAPATTSLIFSSQHPLCASPPICSLQSLRPPAGQA corresponding to amino acids 225-699 of known protein(s) TAST_HUMAN (SEQ ID NO: 463), which also corresponds to amino acids 225-699 of T86235_P7 (SEQ ID NO:472), a third amino acid sequence being at least about 70%, optionally at least 80%, preferably at least 85%, more preferably at least 90% and most preferably at least 95% homologous to a polypeptide having the sequence GKELAGKECEHKRSSPHCELHTCPAPTPGNLMLPHLPPWPSLALPQEEGRGCTSSPVLLIGLAVGGGGGED STWWKYRTPDLPLNFPCPS (SEQ ID NO: 514) corresponding to amino acids 700-789 of T86235_P7 (SEQ ID NO:472), and a fourth amino acid sequence being at least about 90% homologous to GLSNLAPRTLALRERLKSCLTAIHCFHEARLDDECAFYTSRAPPSGPTRVCTNPVATLLEWQDALCFIPVGS AAPQGSP corresponding to amino acids 700-778 of known protein(s) TAST_HUMAN (SEQ ID NO: 463), which also corresponds to amino acids 790-868 of T86235_P7 (SEQ ID NO:472), wherein said first amino acid sequence, bridging amino acid, second amino acid sequence, third amino acid sequence and fourth amino acid sequence are contiguous and in a sequential order.

[1857] B. An isolated polypeptide encoding for an edge portion of T86235_P7 (SEQ ID NO:472), comprising an amino acid sequence being at least about 70%, optionally at least about 80%, preferably at least about 85%, more preferably at least about 90% and most preferably at least about 95% homologous to the sequence

(SEQ ID NO: 514)

GKELAGKECEHKRSSPHCELHTCPAPTPGNLMLPHLPPWPSLALPQEEGR
GCTSSPVLLIGLAVGGGGGEDSTWWKYRTPDLPLNFPCPS
of

(SEQ ID NO: 472)

T86235_P7.

2. Comparison Report Between T86235_P7 (SEQ ID NO:472) and known protein(s) Q8N5B2_HUMAN (SEQ ID NO: 467):

[1858] A. An isolated chimeric polypeptide encoding for T86235_P7 (SEQ ID NO:472), comprising a first amino acid sequence being at least about 90% homologous to MTTRQATKDPLLRGVSPTPSKIPVRSQKRTPFPTVTSCAVDQENQDPRRWVQKPPLNIQRPLVDSAGPRPK ARHQAETSQRLVGISQPRNPLEELRPSPRGQNVGPGPPAQTEAPGTIEFVADPAALATILSGEGVKSCHLGR QPSLAKRVLVRGSQGGTTQRVQGVRASAYLAPRTPTBRLDPARASCFSRLEGPGPRGRTLCPQRLQALISP SGPSFHPSTRPSFQELRRETAGSSRTSVSQASGLLLETPVQPAFSLPKGEREVVTHSDEGGVASLGLAQRVP LRENREMSHTRDSHDSHLMPSPAPVAQPLPGHVVPCPSPFGRAQRVPSPGPPTLTSYSVLRRLTVQPKTRFT PMPSTPRVQQAQWLRGVSPQSCSEDPALPWEQVAVRLFDQESCIRSLEGSGKPPVATPSGPHSNRTPSLQE VKIQRIGILQQLLRQEVEGLVGGQCVPLNGGSSLDMVELQPLLTEISRTLNATEHNSGTSHLPGLLKHSGLP KPCLPEECGEPQPCPPAEPGPPEAFCRSEPEIPEPSLQEQLEVPEPYPPAEPRPLESCCRSEPEIPESSRQEQLE VPEPCPPAEPRPLESYCRIEPEIPESSRQEQLEVPEPCPPAEPGPLQPSTQGQSGPPGPCPRVELGASEPCTLEH RSLESSLPPCCSQWAPATTSLIFSSQHPLCASPPICSLQSLRPPAGQA corresponding to amino acids 1-699 of known protein(s) Q8N5B2_HUMAN (SEQ ID NO: 467), which also corresponds to amino acids 1-699 of T86235_P7 (SEQ ID NO:472), a second amino acid sequence being at least about 70%, optionally at least 80%, preferably at least 85%, more preferably at least 90% and most preferably at least 95% homologous to a polypeptide having the sequence GKELAGKECEHKRSSPHCELHTCPAPTPGNLMLPHLPPWPSLALPQEEGRGCTSSPVLLIGLAVGGGGGED STWWKYRTPDLPLNFPCPS (SEQ ID NO: 514) corresponding to amino acids 700-789 of T86235_P7 (SEQ ID NO:472), and a third amino acid sequence being at least about 90% homologous to GLSNLAPRTLALRERLKSCLTAIHCFHEARLDDECAFYTSRAPPSGPTRVCTNPVATLLEWQDALCFIPVGS AAPQGSP corresponding to amino acids 700-778 of known protein(s) Q8N5B2_HUMAN (SEQ ID NO: 467), which also corresponds to amino acids 790-868 of T86235_P7 (SEQ ID NO:472), wherein said first amino acid sequence, second amino acid sequence and third amino acid sequence are contiguous and in a sequential order.

[1859] B. An isolated polypeptide encoding for an edge portion of T86235_P7 (SEQ ID NO:472), comprising an amino acid sequence being at least about 70%, optionally at least about 80%, preferably at least about 85%, more preferably at least about 90% and most preferably at least about 95% homologous to the sequence

(SEQ ID NO: 514)

GKELAGKECEHKRSSPHCELHTCPAPTPGNLMLPHLPPWPSLALPQEEGR
GCTSSPVLLIGLAVGGGGGEDSTWWKYRTPDLPLNFPCPS
of

(SEQ ID NO: 472)

T86235_P7.

### 3. Comparison Report Between T86235_P7 (SEQ ID NO:472) and Known Protein(s) Q6PJU7_HUMAN (SEQ ID NO: 439):

[1860] A. An isolated chimeric polypeptide encoding for T86235_P7 (SEQ ID NO:472), comprising a first amino acid sequence being at least about 90% homologous to MTTRQATKDPLLRGVSPTPSKIPVRSQKRTPFPTVTSCAVDQENQDPRRWVQKPPLNIQRPLVDSAGPRPK ARHQAETSQRLVGISQPRNPLEELRPSPRGQNVGPGPPAQT corresponding to amino acids 1-112 of known protein(s) Q6PJU7_HUMAN (SEQ ID NO: 439), which also corresponds to amino acids 1-112 of T86235_P7 (SEQ ID NO:472), and a second amino acid sequence being at least about 70%, optionally at least 80%, preferably at least 85%, more preferably at least 90% and most preferably at least 95% homologous to a polypeptide having the sequence EAPGTIEFVADPAALATILSGEGVKSCHLGRQPSLAKRVLVRGSQGGTTQRVQGVRASAYLAPRTPTHRLD PARASCFSRLEGPGPRGRTLCPQRLQALISPSGPSFHPSTRPSFQELRRETAGSSRTSVSQASGLLLETPVQPA FSLPKGEREVVTHSDEGGVASLGLAQRVPLRENREMSHTRDSHDSHLMPSPAPVAQPLPGHVVPCPSPFGR AQRVPSPGPPTLTSYSVLRRLTVQPKTRFTPMPSTPRVQQAQWLRGVSPQSCSEDPALPWEQVAVRLFDQE SCIRSLEGSGKPPVATPSGPHSNRTPSLQEVKIQRIGILQQLLRQEVEGLVGGQCVPLNGGSSLDMVELQPL LTEISRTLNATEHNSGTSHLPGLLKHSGLPKPCLPEECGEPQPCPPAEPGPPEAFCRSEPEIPEPSLQEQLEVP EPYPPAEPRPLESCCRSEPEIPESSRQEQLEVPEPCPPAEPRPLESYCRIEPEIPESSRQEQLEVPEPCPPAEPGP LQPSTQGQSGPPGPCPRVELGASEPCTLEHRSLESSLPPCCSQWAPATTSLIFSSQHPLCASPPICSLQSLRPP AGQAGKELAGKECEHKRSSPHCELHTCPAPTPGNLMLPHLPPWPSLALPQEEGRGCTSSPVLLIGLAVGGG GGEDSTWWKYRTPDLPLNFPCPSGLSNLAPRTLALRERLKSCLTAIHCFHEARLDDECAFYTSRAPPSGPT RVCTNPVATLLEWQDALCFIPVGSAAPQGSP (SEQ ID NO: 517) corresponding to amino acids 113-868 of T86235_P7 (SEQ ID NO:472), wherein said first amino acid sequence and second amino acid sequence are contiguous and in a sequential order.

[1861] B. An isolated polypeptide encoding for an edge portion of T86235_P7 (SEQ ID NO:472), comprising an amino acid sequence being at least about 70%, optionally at least about 80%, preferably at least about 85%, more preferably at least about 90% and most preferably at least about 95% homologous to the sequence

(SEQ ID NO: 517)

EAPGTIEFVADPAALATILSEGVKSCHLGRQPSLAKRVLVRGSQGGTTQR
VQGVRASAYLAPRTPTHRLDPARASCFSRLEGPGPRGRTLCPQRLQALIS
PSGPSFHPSTRPSFQELRRETAGSSRTSVSQASGLLLETPVQPAFSLPKG
EREVVTHSDEGGVASLGLAQRVPLRENREMSHTRDSHDSHLMPSPAPVAQ
PLPGHVVPCPSPFGRAQRVPSPGPPTLTSYSVLRRTVQPKTRFTPMPSTP
RVQQAQWLRGVSPQSCSEDPALPWEQVAVRLFDQESCIRSLEGSGKPPVA
TPSGPHSNRTPSLQEVKIQRIGILQQLLRQEVEGLVGGQCVPLNGGSSLD
MVELQPLLTEISRTLNATEHNSGTSHLPGLLKHSGLPKPCLPEECGEPQP
CPPAEPGPPEAFCRSEPEIPEPSLQEQLEVPEPYPPAEPRPLESCCRSEP
EIPESSRQEQLEVPEPGPPAEPRPLESYCRIEPEIPESSRQEQLEVPEPC
PPAEPGPLQPSTQGQSGPPGPCPRVELGASEPCTLEHRSLESSLPPCCSQ
WAPATTSLIFSSQHPLCASPPICSLQSLRPPAGQAGKELAGKECEHKRSS
PHCELHTCPAPTPGNLMLPHLPPWPSLALPQEEGRGCTSSPVLLIGLAVG
GGFFEDSTWWKYRTPDLPLNFPCPSGLSNLAPRTLALRERLKSCTAIHCF
HEARLDDECARYTSRAPPSGPTRVCTNPVATLLEWQDALCFIPVGSAAPQ
GSP
of

(SEQ ID NO: 472)

T86235_P7.

[1862] The localization of the variant protein was determined according to results from a number of different software programs and analyses, including analyses from SignalP and other specialized programs. The variant protein is believed to be located intracellularly with regard to the cell.

[1863] Variant protein T86235_P7 (SEQ ID NO:472) also has the following non-silent SNPs (Single Nucleotide Polymorphisms) as listed in Table 162, (given according to their position(s) on the amino acid sequence, with the alternative amino acid(s) listed).

TABLE 162
Amino acid mutations

| SNP position(s) on amino acid | |
|---|---|
| sequence | Alternative amino acid(s) |
| 82 | L -> |
| 116 | G -> |
| 120 | F -> |
| 165 | Q -> |
| 242 | V -> A |
| 293 | M -> V |
| 333 | P -> L |
| 392 | A -> V |
| 559 | C -> |
| 562 | S -> G |
| 649 | L -> |
| 776 | Y -> S |
| 790 | G -> |

[1864] Variant protein T86235_P7 (SEQ ID NO:472) is encoded by the following transcript(s): T86235_T7 (SEQ ID NO:442), for which the coding portion starts at position 298 and ends at position 2901. The transcript also has the following SNPs as listed in Table 163 (given according to their position on the nucleotide sequence, with the alternative nucleic acid listed).

TABLE 163
Nucleic acid SNPs

| Polymorphism | SNP position(s) on nucleotide sequence |
|---|---|
| G -> | 240, 643, 792, 2666 |
| G -> A | 360, 1704, 2929 |
| A -> C | 439, 2624 |
| T -> | 541, 655, 1972 |
| C -> T | 909, 1272, 1295, 1374, 1472 |
| T -> C | 1022, 1890 |
| A -> G | 1174, 1509, 1632, 1981 |
| C -> | 2242 |

[1865] Variant protein T86235_P11 (SEQ ID NO:473) according to the present invention has an amino acid sequence encoded by transcript(s) T86235_T11 (SEQ ID NO:443). One or more alignments to one or more previously published protein sequences are given in the alignment table on the attached CDROM. A brief description of the relationship of the variant protein according to the present invention to each such aligned protein is as follows:

### 1. Comparison Report Between T86235_P111 (SEQ ID NO:473) and Known Protein(s) TAST_HUMAN (SEQ ID NO: 463):

[1866] A. An isolated chimeric polypeptide encoding for T86235_P111 (SEQ ID NO:473), comprising a first amino acid sequence being at least about 90% homologous to MTTRQATKDPLLRGVSPTPSKIPVRSQKRTPFPTVTSCAVDQENQDPRRWVQKPPLNIQRPLVDSAGPRPK ARHQAETSQRLVGISQPRNPLEELRPSPRGQNVGPGPPAQTEAPGTIEFVADPAALATILSGEGVKSCHLGR QPSLAKRVLVRGSQGGTTQRVQGVRASAYLAPRTPTHRLDPARASCFSRLEGPGPRGRTLCPQRLQALISP SGPSFHPST corresponding to amino acids 1-223 of known protein(s) TAST_HUMAN (SEQ ID NO: 463), which also corresponds to amino acids 1-223 of T86235_P11 (SEQ ID NO:473), a bridging amino acid R corresponding to amino acid 224 of T86235_P11 (SEQ ID NO:473), a second amino acid sequence being at least about 90% homologous to PSFQELRRETAGSSRTSVSQASGLLLETPVQPAFSLPKGEREVVTHSDEGGVASLGLAQRVPLRENREMSH TRDSHDSHLMPSPAPVAQPLPGHVVPCPSPFGRAQRVPSPGPPTLTSYSVLRRLTVQPKTRFTPMPSTPRVQ QAQWLRGVSPQSCSEDPALPWEQVAVRLFDQESCIRSLEGSGKPPVATPSGPHSNRTPSLQEVKIQRIGILQ QLLRQEVEGLVGGQCVPLNGGSSLDMVELQPLLTEISRTLNATEHNSGTSHLPGLLKHSGLPKPCLPEECG EPQPCPPAEPGPPEAFCRSEPEIPEPSLQEQLEVPEPYPPAEPRPLESCCRSEPEIPESSRQEQLE corresponding to amino acids 225-576 of known protein(s) TAST_HUMAN (SEQ ID NO: 463), which also corresponds to amino acids 225-576 of T86235_P11 (SEQ ID NO:473), a third amino acid sequence being at least about 90% homologous to EQLEVPEPCPPAEPGPLQPSTQGQSGPPGPCPRVELGASEPCTLEHRSLESSLPPCCSQWAPATTSLIFSSQHP LCASPPICSLQSLRPPAGQAGLSNLAPRTLALRERLKSCLTAIHCFHEARLDDECAFYTSRAPPSGPTRVCTN PVATLLEWQDAL corresponding to amino acids 606-764 of known protein(s) TAST_HUMAN (SEQ ID NO: 463), which also corresponds to amino acids 577-735 of T86235_P11 (SEQ ID NO:473), and a fourth amino acid sequence being at least about 70%, optionally at least 80%, preferably at least 85%, more preferably at least 90% and most preferably at least 95% homologous to a polypeptide having the sequence VRLQPTAQLWLHSEPDGRWGTGTGGHLGFFTERSAGRLGYSARLAEL (SEQ ID NO: 518) corresponding to amino acids 736-782 of T86235_P11 (SEQ ID NO:473), wherein said first amino acid sequence, bridging amino acid, second amino acid sequence, third amino acid sequence and fourth amino acid sequence are contiguous and in a sequential order.

[1867] B. An isolated chimeric polypeptide encoding for an edge portion of T86235_P11 (SEQ ID NO:473), comprising a polypeptide having a length “n”, wherein n is at least about 10 amino acids in length, optionally at least about 20 amino acids in length, preferably at least about 30 amino acids in length, more preferably at least about 40 amino acids in length and most preferably at least about 50 amino acids in length, wherein at least two amino acids comprise EE, having a structure as follows: a sequence starting from any of amino acid numbers 576−x to 576; and ending at any of amino acid numbers 577+((n−2)−x), in which x varies from 0 to n−2.

[1868] C. An isolated polypeptide encoding for an edge portion of T86235_P11 (SEQ ID NO:473), comprising an amino acid sequence being at least about 70%, optionally at least about 80%, preferably at least about 85%, more preferably at least about 90% and most preferably at least about 95% homologous to the sequence

(SEQ ID NO: 518)

VRLQPTAQLWLHSEPDGRWGTGTGGHLGFFTERSAGRLGYSARLAEL
of

(SEQ ID NO: 473)

T86235_P11.

### 2. Comparison Report Between T86235_P11 (SEQ ID NO:473) and Known Protein(s) Q8NSB2_HUMAN (SEQ ID NO: 467):

[1869] A. An isolated chimeric polypeptide encoding for T86235_P11 (SEQ ID NO:473), comprising a first amino acid sequence being at least about 90% homologous to

MTTRQATKDPLLRGVSPTPSKIPVRSQKRTPFPTVTSCAVDQENQDPRRW
VQKPPLNIQRPLVDSAGPRPKARHQAETSQRLVGISQPRNPLEELRPSPR
GQNVGPGPPAQTEAPGTIEFVDPAALATILSGEGVKSCHLGRQPSLAKRV
LVRGSQGGTTQRVQGVASAYLAPRTPTHRLDPARASCFSRLEGPGPRGRT
LCPQRLQALISPSGPSFHPSTRPSFQELRRETAGSSRTSVSQASGLLLET
PVQPAFSLPKGEREVVTHSDEGGVASLGLAQRVPLRENREMSHTRDSHDS
HLMPSPAPVAQPLPGHVVPCPSPFGRAQRVPSPGPPTLTSYSVLRRLTVQ
PKTRFTPMPSTPRVQQAQWLRGVSPQSCSEDPALPWEQVAVRLFDQESCI
RSLEGSGKPPVATPSGPHSNRTPSLQEVKIQRIGILQQLLRQEVEGLVGG
QCVPLNGGSSLDMVELQPLLTEISRTLNATEHNSGTSHLPGLLKHSGLPK
PCLPEECGEPQPCPPAEPGPPEAFCRSEPEIPEPSLQEQLEVPEPYPPAE
PRPLESCCRSEPEIPESSRQEQLE

corresponding to amino acids 1-576 of known protein(s) Q8N5B2_HUMAN (SEQ ID NO: 467), which also corresponds to amino acids 1-576 of T86235_P11 (SEQ ID NO:473), a second amino acid sequence being at least about 90% homologous to EQLEVPEPCPPAEPGPLQPSTQGQSGPPGPCPRVELGASEPCTLEHRSLESSLPPCCSQWAPATTSLIFSSQHP LCASPPICSLQSLRPPAGQAGLSNLAPRTLALRERLKSCLTAIHCFHEARLDDECAFYTSRAPPSGPTRVCTN PVATLLEWQDAL corresponding to amino acids 606-764 of known protein(s) Q8N5B2_HUMAN (SEQ ID NO: 467), which also corresponds to amino acids 577-735 of T86235_P11 (SEQ ID NO:473), and a third amino acid sequence being at least about 70%, optionally at least 80%, preferably at least 85%, more preferably at least 90% and most preferably at least 95% homologous to a polypeptide having the sequence VRLQPTAQLWLHSEPDGRW GTGTGGHLGFFTERSAGRLGYSARLAEL (SEQ ID NO: 518) corresponding to amino acids 736-782 of T86235_P11 (SEQ ID NO:473), wherein said first amino acid sequence, second amino acid sequence and third amino acid sequence are contiguous and in a sequential order.

[1870] B. An isolated chimeric polypeptide encoding for an edge portion of T86235_P11 (SEQ ID NO:473), comprising a polypeptide having a length “n”, wherein n is at least about 10 amino acids in length, optionally at least about 20 amino acids in length, preferably at least about 30 amino acids in length, more preferably at least about 40 amino acids in length and most preferably at least about 50 amino acids in length, wherein at least two amino acids comprise EE, having a structure as follows: a sequence starting from any of amino acid numbers 576−x to 576; and ending at any of amino acid numbers 577+((n−2)−x), in which x varies from 0 to n−2.

[1871] C. An isolated polypeptide encoding for an edge portion of T86235_P11 (SEQ ID NO:473), comprising an amino acid sequence being at least about 70%, optionally at least about 80%, preferably at least about 85%, more preferably at least about 90% and most preferably at least about 95% homologous to the sequence

(SEQ ID NO: 518)

VRLQPTAQLWLHSEPDGRWGTGTGGHLGFFTERSAGRLGYSARLAEL
of

(SEQ ID NO: 473)

T86235_P11.

### 3. Comparison Report Between T86235_P11 (SEQ ID NO:473) and Known Protein(s) Q6PJU7_HUMAN (SEQ ID NO: 439):

[1872] A. An isolated chimeric polypeptide encoding for T86235_P11 (SEQ ID NO:473), comprising a first amino acid sequence being at least about 90% homologous to MTTRQATKDPLLRGVSPTPSKIPVRSQKRTPFPTVTSCAVDQENQDPRRWVQKPPLNIQRPLVDSAGPRPK ARHQAETSQRLVGISQPRNPLEELRPSPRGQNVGPGPPAQT corresponding to amino acids 1-112 of known protein(s) Q6PJU7_HUMAN (SEQ ID NO: 439), which also corresponds to amino acids 1-112 of T86235_P11 (SEQ ID NO:473), and a second amino acid sequence being at least about 70%, optionally at least 80%, preferably at least 85%, more preferably at least 90% and most preferably at least 95% homologous to a polypeptide having the sequence EAPGTIEFVADPAALATILSGEGVKSCHLGRQPSLAKRVLVRGSQGGTTQRVQGVRASAYLAPRTPPTRLD PARASCFSRLEGPGPRGRTLCPQRLQALISPSGPSFHPSTRPSFQELRRETAGSSRTSVSQASGLLLETPVQPA FSLPKGEREVVTHSDEGGVASLGLAQRVPLRENREMSHTRDSHDSHLMPSPAPVAQPLPGHVVPCPSPFGR AQRVPSPGPPTLTSYSVLRRLTVQPKTRFTPNPSTPRVQQAQWLRGVSPQSCSEDPALPWEQVAVRLFDQE SCIRSLEGSGKPPVATPSGPHSNRTPSLQEVKIQRIGILQQLLRQEVEGLVGGQCVPLNGGSSLDMVELQPL LTEISRTLNATEHNSGTSHLPGLLKHSGLPKPCLPEECGEPQPCPPAEPGPPEAFCRSEPEIPEPSLQEQLEVP EPYPPAEPRPLESCCRSEPEIPESSRQEQLEEQLEVPEPCPPAEPGPLQPSTQGQSGPPGPCPRVELGASEPCT LEHRSLESSLPPCCSQWAPATTSLIFSSQHPLCASPPICSLQSLRPPAGQAGLSNLAPRTLALRERLKSCLTAI HCFHEARLDDECAFYTSRAPPSGPTRVCTNPVATLLEWQDALVRLQPTAQLWLHSEPDGRWGTGTGGHL GFFTERSAGRLGYSARLAEL (SEQ ID NO: 519) corresponding to amino acids 113-782 of T86235_P11 (SEQ ID NO:473), wherein said first amino acid sequence and second amino acid sequence are contiguous and in a sequential order.

[1873] B. An isolated polypeptide encoding for an edge portion of T86235_P11 (SEQ ID NO:473), comprising an amino acid sequence being at least about 70%, optionally at least about 80%, preferably at least about 85%, more preferably at least about 90% and most preferably at least about 95% homologous to the sequence

(SEQ ID NO: 519)

EAPGTIEFVADPAALATILSGEGVKSCHLGRQPSLAKRVLVRGSQGGTTQ
RVQGVRASAYLAPRTPTHRLDPARASCFSRLEGPGPRGRTLCPQRIQALI
SPSGPSFHPSTRPSFQELRRETAGSSRTSVSQASGLLLETPVQPAFSLPK
GEREVVTHSDEGGVASLGLAQRVPLRENREMSHTRDSHDSHLMPSPAPVA
QPLPGHVVPCPSPFGRAQRVPSPGPPTLTSYSVLRRLTVQPKTRFTPMPS
TPRVQQAQWLRGVSPQSCSEDPALPWEQVAVRLFDQESCIRSLEGSGKPP
VATPSGPHSNRTPSLQEVKIQRIGILQQLLRQEVEGLVGGQCVPLNGGSS
LDMVELQPLLTEISRTLNATEHNSGTSHLPGLLKHSGLPKPCLPEECGEP
QPCPPAEPGPPEAFCRSEPEIPEPSLQEQLEVPEPYPPAEPRPLESCCRS
EPEIPESSRQEQLEEQLEVPEPCPPAEPGPLQPSTQGQSGPPGPCPRVEL
GASEPCTLEHRSLESSLPPCCSQWAPATTSLIFSSQHPLCASPPICSLQS
LRPPAGQAGLSNLAPRTLALRERLKSCLTAIHCFHEARLDDECAFYTSRA
PPSGPTRVCTNPVATLLEWQDALVRLQPTAQLWLHSEPDGRWGTGTGGHL
GFFTERSAGRLGYSARLAEL
of

(SEQ ID NO: 473)

T86235_P11.

[1874] The localization of the variant protein was determined according to results from a number of different software programs and analyses, including analyses from SignalP and other specialized programs. The variant protein is believed to be located intracellularly with regard to the cell.

[1875] Variant protein T86235_P11 (SEQ ID NO:473) also has the following non-silent SNPs (Single Nucleotide Polymorphisms) as listed in Table 164, (given according to their position(s) on the amino acid sequence, with the alternative amino acid(s) listed).

TABLE 164
Amino acid mutations

| SNP position(s) on amino acid | |
|---|---|
| sequence | Alternative amino acid(s) |
| 82 | L -> |
| 116 | G -> |
| 120 | F -> |
| 165 | Q -> |
| 242 | V -> A |
| 293 | M -> V |
| 333 | P -> L |
| 392 | A -> V |
| 559 | C -> |
| 562 | S -> G |
| 620 | L -> |
| 671 | G -> |

[1876] Variant protein T86235_P11 (SEQ ID NO:473) is encoded by the following transcript(s): T86235_T11 (SEQ ID NO:443), for which the coding portion starts at position 298 and ends at position 2643. The transcript also has the following SNPs as listed in Table 165 (given according to their position on the nucleotide sequence, with the alternative nucleic acid listed).

TABLE 165
Nucleic acid SNPs

| Polymorphism | SNP position(s) on nucleotide sequence |
|---|---|
| G -> | 240, 643, 792, 2309 |
| G -> A | 360, 1704, 2737 |
| A -> C | 439 |
| T -> | 541, 655, 1972 |
| C -> T | 909, 1272, 1295, 1374, 1472 |
| T -> C | 1022, 1890, 2652 |
| A -> G | 1174, 1509, 1632, 1981 |
| C -> | 2155 |

[1877] Variant protein T86235_P15 (SEQ ID NO:474) according to the present invention has an amino acid sequence encoded by transcript(s) T86235_T18 (SEQ ID NO:446). One or more alignments to one or more previously published protein sequences are given in the alignment table on the attached CDROM. A brief description of the relationship of the variant protein according to the present invention to each such aligned protein is as follows:

### 1. Comparison Report Between T86235_P15 (SEQ ID NO:474) and Known Protein(s) TAST_HUMAN (SEQ ID NO: 463):

[1878] A. An isolated chimeric polypeptide encoding for T86235_P15 (SEQ ID NO:474), comprising a first amino acid sequence being at least about 90% homologous to MTTRQATKDPLLRGVSPTPSKIPVRSQKRTPFPTVTSCAVDQENQDPRRWVQKPPLNIQRPLVDSAGPRPK ARHQAETSQRLVGISQPRNPLEELRPSPRGQNVGPGPPAQTEAPGTIEFVADPAALATILSGEGVKSCHLGR QPSLAKRVLVRGSQGGTTQRVQGVRASAYLAPRTPTHRLDPARASCFSRLEGPGPRGRTLCPQRLQALISP SGPSFHPST corresponding to amino acids 1-223 of known protein(s) TAST_HUMAN (SEQ ID NO: 463), which also corresponds to amino acids 1-223 of T86235_P15 (SEQ ID NO:474), a bridging amino acid R corresponding to amino acid 224 of T86235_P15 (SEQ ID NO:474), a second amino acid sequence being at least about 90% homologous to PSFQELRRETAGSSRTSVSQASGLLLETPVQPAFSLPKGEREVVTHSDEGGVASLGLAQRVPLRENREMSH TRDSHDSHLMPSPAPVAQPLPGHVVPCPSPFGRAQRVPSPGPPTLTSYSVLRRLTVQPKTRFTPMPSTPRVQ QAQWLRGVSPQSCSEDPALPWEQVAVRLFDQESCIRSLEGSGKPPVATPSGPHSNRTPSLQEVKIQRIGILQ QLLRQEVEGLVGGQCVPLNGGSSLDMVELQPLLTEISRTLNATEHNSGTSHLPGLLKHSGLPKPCLPEECG EPQPCPPAEPGPPEAFCRSEPEIPEPSLQEQLEVPEPYPPAEPRPLESCCRSEPEIPESSRQEQLE corresponding to amino acids 225-576 of known protein(s) TAST_HUMAN (SEQ ID NO: 463), which also corresponds to amino acids 225-576 of T86235_P15 (SEQ ID NO:474), a third amino acid sequence being at least about 90% homologous to EQLEVPEPCPPAEPGPLQPSTQGQSGPPGPCPRVELGASEPCTLEHRSLESSLPPCCSQWAPATTSLIFSSQHP LCASPPICSLQSLRPPAGQA corresponding to amino acids 606-699 of known protein(s) TAST_HUMAN (SEQ ID NO: 463) and which also corresponds to amino acids 577-670 of T86235_P15 (SEQ ID NO:474), a fourth amino acid sequence being at least about 70%, optionally at least 80%, preferably at least 85%, more preferably at least 90% and most preferably at least 95% homologous to a polypeptide having the sequence GKELAGKECEHKRSSPHCELHTCPAPTPGNLMLPHLPPWPSLALPQEEGRGCTSSPVLLIGLAVGGGGGED STWWKYRTPDLPLNFPCPS (SEQ ID NO: 514) corresponding to amino acids 671-760 of T86235_P15 (SEQ ID NO:474), a fifth amino acid sequence being at least about 90% homologous to GLSNLAPRTLALRERLKSCLTAIHCFHEARLDDECAFYTSRAPPSGPTRVCTNPVATLLEWQDAL corresponding to amino acids 700-764 of known protein(s) TAST_HUMAN (SEQ ID NO: 463), which also corresponds to amino acids 761-825 of T86235_P15 (SEQ ID NO:474), and a sixth amino acid sequence being at least about 70%, optionally at least 80%, preferably at least 85%, more preferably at least 90% and most preferably at least 95% homologous to a polypeptide having the sequence VRLQPTAQLWLHSEPDGRWGTGTGGHLGFFTERSAGRLGYSARLAEL (SEQ ID NO: 518) corresponding to amino acids 826-872 of T86235_P15 (SEQ ID NO:474), wherein said first amino acid sequence, bridging amino acid, second amino acid sequence, third amino acid sequence, fourth amino acid sequence, fifth amino acid sequence and sixth amino acid sequence are contiguous and in a sequential order.

[1879] B. An isolated chimeric polypeptide encoding for an edge portion of T86235_P15 (SEQ ID NO:474), comprising a polypeptide having a length “n”, wherein n is at least about 10 amino acids in length, optionally at least about 20 amino acids in length, preferably at least about 30 amino acids in length, more preferably at least about 40 amino acids in length and most preferably at least about 50 amino acids in length, wherein at least two amino acids comprise EE, having a structure as follows: a sequence starting from any of amino acid numbers 576−x to 576; and ending at any of amino acid numbers 577+((n−2)−x), in which x varies from 0 to n−2.

[1880] C. An isolated polypeptide encoding for an edge portion of T86235_P15 (SEQ ID NO:474), comprising an amino acid sequence being at least about 70%, optionally at least about 80%, preferably at least about 85%, more preferably at least about 90% and most preferably at least about 95% homologous to the sequence

(SEQ ID NO: 514)

GKELAGKECEHKRSSPHCELHTCPAPTPGNLMLPHLPPWPSLALPQEEGR
GCTSSPVLLIGLAVGGGGGEDSTWWKYRTPDLPLNFPCPS
of

(SEQ ID NO: 474)

T86235_P15.

[1881] D. An isolated polypeptide encoding for an edge portion of T86235_P15 (SEQ ID NO:474), comprising an amino acid sequence being at least about 70%, optionally at least about 80%, preferably at least about 85%, more preferably at least about 90% and most preferably at least about 95% homologous to the sequence

(SEQ ID NO: 518)

VRLQPTAQLWLHSEPDGRWGTGTGGHLGFFTERSAGRLGYSARLAEL
of

(SEQ ID NO: 474)

T86235_P15.

### 2. Comparison Report Between T86235_P15 (SEQ ID NO:474) and Known Protein(s) Q8N5B2_HUMAN (SEQ ID NO: 467):

[1882] A. An isolated chimeric polypeptide encoding for T86235_P15 (SEQ ID NO:474), comprising a first amino acid sequence being at least about 90% homologous to MTTRQATKDPLLRGVSPTPSKIPVRSQKRTPFPTVTSCAVDQENQDPRRWVQKPPLNIQRPLVDSAGPRPK ARHQAETSQRLVGISQPRNPLEELRPSPRGQNVGPGPPAQTEAPGTIEFVADPAALATILSGEGVKSCHLGR QPSLAKRVLVRGSQGGTTQRVQGVRASAYLAPRTPTBRLDPARASCFSRLEGPGPRGRTLCPQRLQALISP SGPSFHPSTRPSFQELRRETAGSSRTSVSQASGLLLETPVQPAFSLPKGEREVVTHSDEGGVASLGLAQRVP LRENREMSHTRDSHDSHLMPSPAPVAQPLPGHVVPCPSPFGRAQRVPSPGPPTLTSYSVLRRLTVQPKTRFT PMPSTPRVQQAQWLRGVSPQSCSEDPALPWEQVAVRLFDQESCIRSLEGSGKPPVATPSGPHSNRTPSLQE VKIQRIGILQQLLRQEVEGLVGGQCVPLNGGSSLDMVELQPLLTEISRTLNATEHNSGTSHLPGLLKHSGLP KPCLPEECGEPQPCPPAEPGPPEAFCRSEPEIPEPSLQEQLEVPEPYPPAEPRPLESCCRSEPEIPESSRQEQLE corresponding to amino acids 1-576 of known protein(s) Q8N5B2_HUMAN (SEQ ID NO: 467), which also corresponds to amino acids 1-576 of T86235_P15 (SEQ ID NO:474), a second amino acid sequence being at least about 90% homologous to EQLEVPEPCPPAEPGPLQPSTQGQSGPPGPCPRVELGASEPCTLEHRSLESSLPPCCSQWAPATTSLIFSSQHP LCASPPICSLQSLRPPAGQA corresponding to amino acids 606-699 of known protein(s) Q8N5B2_HUMAN (SEQ ID NO: 467), which also corresponds to amino acids 577-670 of T86235_P15 (SEQ ID NO:474), a third amino acid sequence being at least about 70%, optionally at least 80%, preferably at least 85%, more preferably at least 90% and most preferably at least 95% homologous to a polypeptide having the sequence GKELAGKECEHKRSSPHCELHTCPAPTPGNLMLPHLPPWPSLALPQEEGRGCTSSPVLLIGLAVGGGGGED STWWKYRTPDLPLNFPCPS (SEQ ID NO: 514) corresponding to amino acids 671-760 of T86235_P15 (SEQ ID NO:474), a fourth amino acid sequence being at least about 90% homologous to GLSNLAPRTLALRERLKSCLTAIHCFHEARLDDECAFYTSRAPPSGPTRVCTNPVATLLEWQDAL corresponding to amino acids 700-764 of known protein(s) Q8N5B2_HUMAN (SEQ ID NO: 467), which also corresponds to amino acids 761-825 of T86235_P15 (SEQ ID NO:474), and a fifth amino acid sequence being at least about 70%, optionally at least 80%, preferably at least 85%, more preferably at least 90% and most preferably at least 95% homologous to a polypeptide having the sequence VRLQPTAQLWLHSEPDGRWGTGTGGHLGFFTERSAGRLGYSARLAEL (SEQ ID NO: 518) corresponding to amino acids 826-872 of T86235_P15 (SEQ ID NO:474), wherein said first amino acid sequence, second amino acid sequence, third amino acid sequence, fourth amino acid sequence and fifth amino acid sequence are contiguous and in a sequential order.

### 3. Comparison Report Between T86235_P15 (SEQ ID NO:474) and Known Protein(s) Q6PJU7_HUMAN (SEQ ID NO: 439):

[1883] A. An isolated chimeric polypeptide encoding for T86235_P15 (SEQ ID NO:474), comprising a first amino acid sequence being at least about 90% homologous to MTTRQATKDPLLRGVSPTPSKIPVRSQKRTPFPTVTSCAVDQENQDPRRWVQKPPLNIQRPLVDSAGPRPK ARHQAETSQRLVGISQPRNPLEELRPSPRGQNVGPGPPAQT corresponding to amino acids 1-112 of known protein(s) Q6PJU7_HUMAN (SEQ ID NO: 439), which also corresponds to amino acids 1-112 of T86235_P15 (SEQ ID NO:474), and a second amino acid sequence being at least about 70%, optionally at least 80%, preferably at least 85%, more preferably at least 90% and most preferably at least 95% homologous to a polypeptide having the sequence EAPGTIEFVADPAALATILSGEGVKSCHLGRQPSLAKRVLVRGSQGGTTQRVQGVRASAYLAPRTPTHRLD PARASCFSRLEGPGPRGRTLCPQRLQALISPSGPSFHPSTRPSFQELRRETAGSSRTSVSQASGLLLETPVQPA FSLPKGEREVVTHSDEGGVASLGLAQRVPLRENREMSHTRDSHDSHLMPSPAPVAQPLPGHVVPCPSPFGR AQRVPSPGPPTLTSYSVLRRLTVQPKTRFTPMPSTPRVQQAQWLRGVSPQSCSEDPALPWEQVAVRLFDQE SCIRSLEGSGKPPVATPSGPHSNRTPSLQEVKIQRIGILQQLLRQEVEGLVGGQCVPLNGGSSLDMVELQPL LTEISRTLNATEHNSGTSHLPGLLKHSGLPKPCLPEECGEPQPCPPAEPGPPEAFCRSEPEIPEPSLQEQLEVP EPYPPAEPRPLESCCRSEPEIPESSRQEQLEEQLEVPEPCPPAEPGPLQPSTQGQSGPPGPCPRVELGASEPCT LEHRSLESSLPPCCSQWAPATTSLIFSSQHPLCASPPICSLQSLRPPAGQAGKELAGKECEHKRSSPHCELHT CPAPTPGNLMLPHLPPWPSLALPQEEGRGCTSSPVLLIGLAVGGGGGEDSTWWKYRTPDLPLNFPCPSGLS NLAPRTLALRERLKSCLTAIHCFHEARLDDECAFYTSRAPPSGPTRVCTNPVATLLEWQDALVRLQPTAQL WLHSEPDGRWGTGTGGHLGFFTERSAGRLGYSARLAEL (SEQ ID NO: 522) corresponding to amino acids 113-872 of T86235_P15 (SEQ ID NO:474), wherein said first amino acid sequence and second amino acid sequence are contiguous and in a sequential order.

[1884] B. An isolated polypeptide encoding for an edge portion of T86235_P15 (SEQ ID NO:474), comprising an amino acid sequence being at least about 70%, optionally at least about 80%, preferably at least about 85%, more preferably at least about 90% and most preferably at least about 95% homologous to the sequence

(SEQ ID NO: 522)

EAPGTIEFVADPAALATILSGEGVKSCHLGRQPSLAKRVLVRGSQGGTTQ
RVQGVRASAYPRTPTHRLDPARASCFSRLEGPGPRGRTLCPQRLQALISP
SGPSFHPSTRPSFQELRRETAGSSRTSVSQASGLLLETPVQPAFSLPKGE
REVVTHSDEGGVASLGLAQRVPLRENEMSHTDSHDSHLMPSPAPVAQPLP
GHVVPCPSPFGRAQRVPSPGPPTLTSYSVLRRLTVQPKTRFTPMPSTPRV
QQAQWLRGVSPQSCSEDPALPWEQVAVRLFDQESCIRSLEGSGKPPVATP
SGPHSNRTPSLQEVKIQRIGILQQLLRQEVEGLVGGQCVPLNGGSSLDMV
ELQPLLTEISRTLNATEHNSGTSHLPGLLKHSGLPKPCLPEECGEPQPCP
PAEPGPPEAFCRSEPEIPEPSLQEQLEVPEPYPPAEPRPLESCCRSEPEI
PESSRQEQLEEQLEVPEPCPPAEPGPLQPSTQGQSGPPGPCPRVELGASE
PCTLEHRSLESSLPPCCSQWAPATTSLIFSSQHPLCASPPICSLQSLRPP
AGQAGKELAGKECEHKRSSPHCELHTCPAPTPGNLMLPHLPPWPSLALPQ
EEGRGCTSSPVLLIGLAVGGGGGEDSTWWKYRTPDLPLNFPCPSGLSNLA
PRTLALRERLKSCLTAIHCFHEARLDDECAFYTSRAPPSGPTRVCTNPVA
TLLEWQDALVRLQPTAQLWLHSEPDGRWGTGTGGHLGFFTERSAGRLGYS
ARLAEL
of

(SEQ ID NO: 474)

T86235_P15.

[1885] The localization of the variant protein was determined according to results from a number of different software programs and analyses, including analyses from SignalP and other specialized programs. The variant protein is believed to be located intracellularly with regard to the cell.

[1886] Variant protein T86235_P15 (SEQ ID NO:474) also has the following non-silent SNPs (Single Nucleotide Polymorphisms) as listed in Table 166, (given according to their position(s) on the amino acid sequence, with the alternative amino acid(s) listed).

TABLE 166
Amino acid mutations

| SNP position(s) on amino acid | |
|---|---|
| sequence | Alternative amino acid(s) |
| 82 | L -> |
| 116 | G -> |
| 120 | F -> |
| 165 | Q -> |
| 242 | V -> A |
| 293 | M -> V |
| 333 | P -> L |
| 392 | A -> V |
| 559 | C -> |
| 562 | S -> G |
| 620 | L -> |
| 747 | Y -> S |
| 761 | G -> |

[1887] Variant protein T86235_P15 (SEQ ID NO:474) is encoded by the following transcript(s): T86235_T18 (SEQ ID NO:446), for which the coding portion starts at position 298 and ends at position 2913. The transcript also has the following SNPs as listed in Table 167 (given according to their position on the nucleotide sequence, with the alternative nucleic acid listed).

TABLE 167
Nucleic acid SNPs

| Polymorphism | SNP position(s) on nucleotide sequence |
|---|---|
| G -> | 240, 643, 792, 2579 |
| G -> A | 360, 1704, 3007 |
| A -> C | 439, 2537 |
| T -> | 541, 655, 1972 |
| C -> T | 909, 1272, 1295, 1374, 1472 |
| T -> C | 1022, 1890, 2922 |
| A -> G | 1174, 1509, 1632, 1981 |
| C -> | 2155 |

[1888] Variant protein T86235_P21 (SEQ ID NO:475) according to the present invention has an amino acid sequence encoded by transcript(s) T86235_T26 (SEQ ID NO:447). One or more alignments to one or more previously published protein sequences are given in the alignment table on the attached CDROM. A brief description of the relationship of the variant protein according to the present invention to each such aligned protein is as follows:

### 1. Comparison Report Between T86235_P21 (SEQ ID NO:475) and Known Protein(s) TAST_HUMAN (SEQ ID NO: 463):

[1889] A. An isolated chimeric polypeptide encoding for T86235_P21 (SEQ ID NO:475), comprising a first amino acid sequence being at least about 70%, optionally at least 80%, preferably at least 85%, more preferably at least 90% and most preferably at least 95%, homologous to a polypeptide having the sequence KKKKKISQIQLNESLAHLVPQSSYARGPIPLSLPPSFSFSSFLA (SEQ ID NO: 523) corresponding to amino acids 1-44 of T86235_P21 (SEQ ID NO:475), a second amino acid sequence being at least about 90% homologous to EAPGTIEFVADPAALATILSGEGVKSCHLGRQPSLAKRVLVRGSQGGTTQRVQGVRASAYLAPRTPTBRLD PARASCFSRLEGPGPRGRTLCPQRLQALISPSGPSFHPST corresponding to amino acids 113-223 of known protein(s) TAST_HUMAN (SEQ ID NO: 463), which also corresponds to amino acids 45-155 of T86235_P21 (SEQ ID NO:475), a bridging amino acid R corresponding to amino acid 156 of T86235_P21 (SEQ ID NO:475), a third amino acid sequence being at least about 90% homologous to PSFQELRRETAGSSRTSVSQASGLLLETPVQPAFSLPKGEREVVTHSDEGGVASLGLAQRVPLRENREMSH TRDSHDSHLMPSPAPVAQPLPGHVVPCPSPFGRAQRVPSPGPPTLTSYSVLRRLTVQPKTRFTPMPSTPRVQ QAQWLRGVSPQSCSEDPALPWEQVAVRLFDQESCIRSLEGSGKPPVATPSGPHSNRTPSLQEVKIQRIGILQ QLLRQEVEGLVGGQCVPLNGGSSLDMVELQPLLTEISRTLNATEHNSGTSHLPGLLKHSGLPKPCLPEECG EPQPCPPAEPGPPEAFCRSEPEIPEPSLQEQLEVPEPYPPAEPRPLESCCRSEPEIPESSRQEQLE corresponding to amino acids 225-576 of known protein(s) TAST_HUMAN (SEQ ID NO: 463), which also corresponds to amino acids 157-508 of T86235_P21 (SEQ ID NO:475), and a fourth amino acid sequence being at least about 90% homologous to EQLEVPEPCPPAEPGPLQPSTQGQSGPPGPCPRVELGASEPCTLEHRSLESSLPPCCSQWAPATTSLIFSSQHP LCASPPICSLQSLRPPAGQAGLSNLAPRTLALRERLKSCLTAIHCFHEARLDDECAFYTSRAPPSGPTRVCTN PVATLLEWQDALCFIPVGSAAPQGSP corresponding to amino acids 606-778 of known protein(s) TAST_HUMAN (SEQ ID NO: 463), which also corresponds to amino acids 509-681 of T86235_P21 (SEQ ID NO:475), wherein said first amino acid sequence, second amino acid sequence, bridging amino acid, third amino acid sequence and fourth amino acid sequence are contiguous and in a sequential order.

[1890] B. An isolated polypeptide encoding for a head of T86235_P21 (SEQ ID NO:475), comprising a polypeptide being at least 70%, optionally at least about 80%, preferably at least about 85%, more preferably at least about 90% and most preferably at least about 95% homologous to the sequence KKKKKISQIQLNESLAHLVPQSSYARGPIPLSLPPSFSFSSFLA (SEQ ID NO: 523) of T86235_P21 (SEQ ID NO:475).

[1891] C. An isolated chimeric polypeptide encoding for an edge portion of T86235_P21 (SEQ ID NO:475), comprising a polypeptide having a length “n”, wherein n is at least about 10 amino acids in length, optionally at least about 20 amino acids in length, preferably at least about 30 amino acids in length, more preferably at least about 40 amino acids in length and most preferably at least about 50 amino acids in length, wherein at least two amino acids comprise EE, having a structure as follows: a sequence starting from any of amino acid numbers 508−x to 508; and ending at any of amino acid numbers 509+((n−2)−x), in which x varies from 0 to n−2.

### 2. Comparison Report Between T86235_P21 (SEQ ID NO:475) and Known Protein(s) Q8N5B2_HUMAN (SEQ ID NO: 467):

[1892] A. An isolated chimeric polypeptide encoding for T86235_P21 (SEQ ID NO:475), comprising a first amino acid sequence being at least about 70%, optionally at least 80%, preferably at least 85%, more preferably at least 90% and most preferably at least 95%, homologous to a polypeptide having the sequence KKKKKISQIQLNESLAHLVPQSSYARGPIPLSLPPSFSFSSFLA (SEQ ID NO: 523) corresponding to amino acids 1-44 of T86235_P21 (SEQ ID NO:475), a second amino acid sequence being at least about 90% homologous to EAPGTIEFVADPAALATILSGEGVKSCHLGRQPSLAKRVLVRGSQGGTTQRVQGVRASAYLAPRTPTHRLD PARASCFSRLEGPGPRGRTLCPQRLQALISPSGPSFHPSTRPSFQELRRETAGSSRTSVSQASGLLLETPVQPA FSLPKGEREVVTHSDEGGVASLGLAQRVPLRENREMSHTRDSHDSHLMPSPAPVAQPLPGHVVPCPSPFGR AQRVPSPGPPTLTSYSVLRRLTVQPKTRFTPMPSTPRVQQAQWLRGVSPQSCSEDPALPWEQVAVRLFDQE SCIRSLEGSGKPPVATPSGPHSNRTPSLQEVKIQRIGILQQLLRQEVEGLVGGQCVPLNGGSSLDMVELQPL LTEISRTLNATEHNSGTSHLPGLLKHSGLPKPCLPEECGEPQPCPPAEPGPPEAFCRSEPEIPEPSLQEQLEVP EPYPPAEPRPLESCCRSEPEIPESSRQEQLE corresponding to amino acids 113-576 of known protein(s) Q8N5B2_HUMAN (SEQ ID NO: 467), which also corresponds to amino acids 45-508 of T86235_P21 (SEQ ID NO:475), and a third amino acid sequence being at least about 90% homologous to EQLEVPEPCPPAEPGPLQPSTQGQSGPPGPCPRVELGASEPCTLEHRSLESSLPPCCSQWAPATTSLIFSSQHP LCASPPICSLQSLRPPAGQAGLSNLAPRTLALRERLKSCLTAIHCFHEARLDDECAFYTSRAPPSGPTRVCTN PVATLLEWQDALCFIPVGSAAPQGSP corresponding to amino acids 606-778 of known protein(s) Q8N5B2_HUMAN (SEQ ID NO: 467), which also corresponds to amino acids 509-681 of T86235_P21 (SEQ ID NO:475), wherein said first amino acid sequence, second amino acid sequence and third amino acid sequence are contiguous and in a sequential order.

[1893] The localization of the variant protein was determined according to results from a number of different software programs and analyses, including analyses from SignalP and other specialized programs. The variant protein is believed to be located intracellularly with regard to the cell.

[1894] Variant protein T86235_P21 (SEQ ID NO:475) also has the following non-silent SNPs (Single Nucleotide Polymorphisms) as listed in Table 168, (given according to their position(s) on the amino acid sequence, with the alternative amino acid(s) listed).

TABLE 168
Amino acid mutations

| SNP position(s) on amino acid | |
|---|---|
| sequence | Alternative amino acid(s) |
| 48 | G -> |
| 52 | F -> |
| 97 | Q -> |
| 174 | V -> A |
| 225 | M -> V |
| 265 | P -> L |
| 324 | A -> V |
| 491 | C -> |
| 494 | S -> G |
| 552 | L -> |
| 603 | G -> |

[1895] Variant protein T86235_P21 (SEQ ID NO:475) is encoded by the following transcript(s): T86235_T26 (SEQ ID NO:447), for which the coding portion starts at position 2 and ends at position 2044. The transcript also has the following SNPs as listed in Table 169 (given according to their position on the nucleotide sequence, with the alternative nucleic acid listed; T86235_P21 (SEQ ID NO:475)).

TABLE 169
Nucleic acid SNPs

| Polymorphism | SNP position(s) on nucleotide sequence |
|---|---|
| G -> | 143, 292, 1809 |
| T -> | 155, 1472 |
| C -> T | 409, 772, 795, 874, 972 |
| T -> C | 522, 1390 |
| A -> G | 674, 1009, 1132, 1481 |
| G -> A | 1204, 2072 |
| C -> | 1655 |

[1896] Variant protein T86235_P26 (SEQ ID NO:476) according to the present invention has an amino acid sequence encoded by transcript(s) T86235_T32 (SEQ ID NO:448). One or more alignments to one or more previously published protein sequences are given in the alignment table on the attached CDROM. A brief description of the relationship of the variant protein according to the present invention to each such aligned protein is as follows:

### 1. Comparison Report Between T86235_P26 (SEQ ID NO:476) and Known Protein(s) TAST_HUMAN (SEQ ID NO: 463):

[1897] A. An isolated chimeric polypeptide encoding for T86235_P26 (SEQ ID NO:476), comprising a first amino acid sequence being at least about 90% homologous to MVELQPLLTEISRTLNATEHNSGTSHLPGLLKHSGLPKPCLPEECGEPQPCPPAEPGPPEAFCRSEPEIPEPSL QEQLEVPEPYPPAEPRPLESCCRSEPEIPESSRQEQLE corresponding to amino acids 465-576 of known protein(s) TAST_HUMAN (SEQ ID NO: 463), which also corresponds to amino acids 1-112 of T86235_P26 (SEQ ID NO:476), and a second amino acid sequence being at least about 90% homologous to EQLEVPEPCPPAEPGPLQPSTQGQSGPPGPCPRVELGASEPCTLEHRSLESSLPPCCSQWAPATTSLIFSSQHP LCASPPICSLQSLRPPAGQAGLSNLAPRTLALRERLKSCLTAIHCFHEARLDDECAFYTSRAPPSGPTRVCTN PVATLLEWQDALCFIPVGSAAPQGSP corresponding to amino acids 606-778 of known protein(s) TAST_HUMAN (SEQ ID NO: 463), which also corresponds to amino acids 113-285 of T86235_P26 (SEQ ID NO:476), wherein said, first amino acid sequence and second amino acid sequence are contiguous and in a sequential order.

[1898] B. An isolated chimeric polypeptide encoding for an edge portion of T86235_P26 (SEQ ID NO:476), comprising a polypeptide having a length “n”, wherein n is at least about 10 amino acids in length, optionally at least about 20 amino acids in length, preferably at least about 30 amino acids in length, more preferably at least about 40 amino acids in length and most preferably at least about 50 amino acids in length, wherein at least two amino acids comprise EE, having a structure as follows: a sequence starting from any of amino acid numbers 112−x to 112; and ending at any of amino acid numbers 113+((n−2)−x), in which x varies from 0 to n−2.

### 2. Comparison Report Between T86235_P26 (SEQ ID NO:476) and Known Protein(s) Q8N5B2_HUMAN (SEQ ID NO: 467):

[1899] A. An isolated chimeric polypeptide encoding for T86235_P26 (SEQ ID NO:476), comprising a first amino acid sequence being at least about 90% homologous to MVELQPLLTEISRTLNATEHNSGTSHLPGLLKHSGLPKPCLPEECGEPQPCPPAEPGPPEAFCRSEPEIPEPSL QEQLEVPEPYPPAEPRPLESCCRSEPEIPESSRQEQLE corresponding to amino acids 465-576 of known protein(s) Q8N5B2_HUMAN (SEQ ID NO: 467), which also corresponds to amino acids 1-112 of T86235_P26 (SEQ ID NO:476), and a second amino acid sequence being at least about 90% homologous to EQLEVPEPCPPAEPGPLQPSTQGQSGPPGPCPRVELGASEPCTLEHRSLESSLPPCCSQWAPATTSLIFSSQHP LCASPPICSLQSLRPPAGQAGLSNLAPRTLALRERLKSCLTAIHCFHEARLDDECAFYTSRAPPSGPTRVCTN PVATLLEWQDALCFIPVGSAAPQGSP corresponding to amino acids 606-778 of known protein(s) Q8N5B2_HUMAN (SEQ ID NO: 467), which also corresponds to amino acids 113-285 of T86235_P26 (SEQ ID NO:476), wherein said, first amino acid sequence and second amino acid sequence are contiguous and in a sequential order.

[1900] The localization of the variant protein was determined according to results from a number of different software programs and analyses, including analyses from SignalP and other specialized programs. The variant protein is believed to be located as follows with regard to the cell: intracellularly.

[1901] Variant protein T86235_P26 (SEQ ID NO:476) also has the following non-silent SNPs (Single Nucleotide Polymorphisms) as listed in Table 170, (given according to their position(s) on the amino acid sequence, with the alternative amino acid(s) listed).

TABLE 170
Amino acid mutations

| SNP position(s) on amino acid | |
|---|---|
| sequence | Alternative amino acid(s) |
| 95 | C -> |
| 98 | S -> G |
| 156 | L -> |
| 207 | G -> |

[1902] Variant protein T86235_P26 (SEQ ID NO:476) is encoded by the following transcript(s): T86235_T32 (SEQ ID NO:448), for which the coding portion starts at position 1198 and ends at position 2052. The transcript also has the following SNPs as listed in Table 171 (given according to their position on the nucleotide sequence, with the alternative nucleic acid listed).

TABLE 171
Nucleic acid SNPs

| Polymorphism | SNP position(s) on nucleotide sequence |
|---|---|
| C -> T | 378, 401, 480, 980 |
| C -> G | 766 |
| G -> A | 911, 1212, 2080 |
| A -> G | 1017, 1140, 1489 |
| T -> C | 1398 |
| T -> | 1480 |
| C -> | 1663 |
| G -> | 1817 |

[1903] Variant protein T86235_P30 (SEQ ID NO:477) according to the present invention has an amino acid sequence encoded by transcript(s) T86235_T36 (SEQ ID NO:449). One or more alignments to one or more previously published protein sequences are given in the alignment table on the attached CDROM. A brief description of the relationship of the variant protein according to the present invention to each such aligned protein is as follows:

### 1. Comparison Report Between T86235_P30 (SEQ ID NO:477) and Known Protein(s) TAST_HUMAN (SEQ ID NO: 463):

[1904] A. An isolated chimeric polypeptide encoding for T86235_P30 (SEQ ID NO:477), comprising a first amino acid sequence being at least about 90% homologous to MTTRQATKDPLLRGVSPTPSKIPVRSQKRTPFPTVTSCAVDQENQDPRRWVQKPPLNIQRPLVDSAGPRPK ARHQAETSQRLVGISQPRNPLEELRPSPRGQNVGPGPPAQT corresponding to amino acids 1-112 of known protein(s) TAST_HUMAN (SEQ ID NO: 463), which also corresponds to amino acids 1-112 of T86235_P30 (SEQ ID NO:477), and a second amino acid sequence being at least about 70%, optionally at least 80%, preferably at least 85%, more preferably at least 90% and most preferably at least 95% homologous to a polypeptide having the sequence GTCWSHGNTASMAE (SEQ ID NO: 534) corresponding to amino acids 113-126 of T86235_P30 (SEQ ID NO:477), wherein said first amino acid sequence and second amino acid sequence are contiguous and in a sequential order.

[1905] B. An isolated polypeptide encoding for an edge portion of T86235_P30 (SEQ ID NO:477), comprising an amino acid sequence being at least about 70%, optionally at least about 80%, preferably at least about 85%, more preferably at least about 90% and most preferably at least about 95% homologous to the sequence GTCWSHGNTASMAE (SEQ ID NO: 534) of T86235_P30 (SEQ ID NO:477).

### 2. Comparison Report Between T86235_P30 (SEQ ID NO:477) and Known Protein(s) Q6PJU7_HUMAN (SEQ ID NO: 439):

[1906] A. An isolated chimeric polypeptide encoding for T86235_P30 (SEQ ID NO:477), comprising a first amino acid sequence being at least about 90% homologous to MTTRQATKDPLLRGVSPTPSKIPVRSQKRTPFPTVTSCAVDQENQDPRRWVQKPPLNIQRPLVDSAGPRPK ARHQAETSQRLVGISQPRNPLEELRPSPRGQNVGPGPPAQT corresponding to amino acids 1-112 of known protein(s) Q6PJU7_HUMAN (SEQ ID NO: 439), which also corresponds to amino acids 1-112 of T86235_P30 (SEQ ID NO:477), and a second amino acid sequence being at least about 70%, optionally at least 80%, preferably at least 85%, more preferably at least 90% and most preferably at least 95% homologous to a polypeptide having the sequence GTCWSHGNTASMAE (SEQ ID NO: 534) corresponding to amino acids 113-126 of T86235_P30 (SEQ ID NO:477), wherein said first amino acid sequence and second amino acid sequence are contiguous and in a sequential order.

[1907] B. An isolated polypeptide encoding for an edge portion of T86235_P30 (SEQ ID NO:477), comprising an amino acid sequence being at least about 70%, optionally at least about 80%, preferably at least about 85%, more preferably at least about 90% and most preferably at least about 95% homologous to the sequence GTCWSHGNTASMAE (SEQ ID NO: 534) of T86235_P30 (SEQ ID NO:477).

### 3. Comparison Report Between T86235_P30 (SEQ ID NO:477) and Known Protein(s) Q8N5B2_HUMAN (SEQ ID NO: 467):

[1908] A. An isolated chimeric polypeptide encoding for T86235_P30 (SEQ ID NO:477), comprising a first amino acid sequence being at least about 90% homologous to MTTRQATKDPLLRGVSPTPSKIPVRSQKRTPFPTVTSCAVDQENQDPRRWVQKPPLNIQRPLVDSAGPRPK ARHQAETSQRLVGISQPRNPLEELRPSPRGQNVGPGPPAQT corresponding to amino acids 1-112 of known protein(s) Q8N5B2_HUMAN (SEQ ID NO: 467), which also corresponds to amino acids 1-112 of T86235_P30 (SEQ ID NO:477), and a second amino acid sequence being at least about 70%, optionally at least 80%, preferably at least 85%, more preferably at least 90% and most preferably at least 95% homologous to a polypeptide having the sequence GTCWSHGNTASMAE (SEQ ID NO: 534) corresponding to amino acids 113-126 of T86235_P30 (SEQ ID NO:477), wherein said first amino acid sequence and second amino acid sequence are contiguous and in a sequential order.

[1909] B. An isolated polypeptide encoding for an edge portion of T86235_P30 (SEQ ID NO:477), comprising an amino acid sequence being at least about 70%, optionally at least about 80%, preferably at least about 85%, more preferably at least about 90% and most preferably at least about 95% homologous to the sequence GTCWSHGNTASMAE (SEQ ID NO: 534) of T86235_P30 (SEQ ID NO:477).

[1910] The localization of the variant protein was determined according to results from a number of different software programs and analyses, including analyses from SignalP and other specialized programs. The variant protein is believed to be located intracellularly with regard to the cell.

[1911] Variant protein T86235_P30 (SEQ ID NO:477) also has the following non-silent SNPs (Single Nucleotide Polymorphisms) as listed in Table 172, (given according to their position(s) on the amino acid sequence, with the alternative amino acid(s) listed).

TABLE 172
Amino acid mutations

| SNP position(s) on amino acid | |
|---|---|
| sequence | Alternative amino acid(s) |
| 82 | L -> |

[1912] Variant protein T86235_P30 (SEQ ID NO:477) is encoded by the following transcript(s): T86235_T36 (SEQ ID NO:449), for which the coding portion starts at position 298 and ends at position 675. The transcript also has the following SNPs as listed in Table 173 (given according to their position on the nucleotide sequence, with the alternative nucleic acid listed).

TABLE 173
Nucleic acid SNPs

| Polymorphism | SNP position(s) on nucleotide sequence |
|---|---|
| G -> | 240 |
| G -> A | 360 |
| A -> C | 439 |
| T -> | 541 |
| A -> T | 954 |

[1913] As noted above, cluster T86235 features 12 segment(s), which were listed in Table 151 above and for which the sequence(s) are given. These segment(s) are portions of nucleic acid sequence(s) which are described herein separately because they are of particular interest. A description of some of these segments according to the present invention is now provided.

[1914] Segment cluster T86235_N2 (SEQ ID NO:450) according to the present invention is supported by 73 libraries. The number of libraries was determined as previously described. This segment can be found in the following transcript(s): T86235_T11 (SEQ ID NO:443), T86235_T13 (SEQ ID NO:444), T86235_T15 (SEQ ID NO:445), T86235_T18 (SEQ ID NO:446), T86235_T36 (SEQ ID NO:449), T86235_T5 (SEQ ID NO:440), T86235_T6 (SEQ ID NO:441) and T86235_T7 (SEQ ID NO:442). Table 174 below describes the starting and ending position of this segment on each transcript.

TABLE 174
Segment location on transcripts

| | Segment | Segment |
|---|---|---|
| Transcript name | starting position | ending position |
| T86235_T11 (SEQ ID NO: 443) | 79 | 292 |
| T86235_T13 (SEQ ID NO: 444) | 79 | 292 |
| T86235_T15 (SEQ ID NO: 445) | 79 | 292 |
| T86235_T18 (SEQ ID NO: 446) | 79 | 292 |
| T86235_T36 (SEQ ID NO: 449) | 79 | 292 |
| T86235_T5 (SEQ ID NO: 440) | 79 | 292 |
| T86235_T6 (SEQ ID NO: 441) | 79 | 292 |
| T86235_T7 (SEQ ID NO: 442) | 79 | 292 |

[1915] Segment cluster T86235_N19 (SEQ ID NO:451) according to the present invention is supported by 3 libraries. The number of libraries was determined as previously described. This segment can be found in the following transcript(s): T86235_T26 (SEQ ID NO:447). Table 175 below describes the starting and ending position of this segment on each transcript.

TABLE 175
Segment location on transcripts

| | Segment | Segment |
|---|---|---|
| Transcript name | starting position | ending position |
| T86235_T26 (SEQ ID NO: 447) | 1 | 134 |

[1916] Microarray (chip) data is also available for this segment as follows. As described above with regard to the cluster itself, various oligonucleotides were tested for being differentially expressed in various disease conditions, particularly cancer. The following oligonucleotides were found to hit this segment, shown in Table 176.

TABLE 176
Oligonucleotides related to this segment

| Oligonucleotide name | Overexpressed in cancers | Chip reference |
|---|---|---|
| T86235_0_74_63 | lung malignant tumors | LUN |
| (SEQ ID NO: 492) | | |

[1917] Segment cluster T86235_N33 (SEQ ID NO:452) according to the present invention is supported by 2 libraries. The number of libraries was determined as previously described. This segment can be found in the following transcript(s): T86235_T32 (SEQ ID NO:448). Table 177 below describes the starting and ending position of this segment on each transcript.

TABLE 177
Segment location on transcripts

| | Segment | Segment |
|---|---|---|
| Transcript name | starting position | ending position |
| T86235_T32 (SEQ ID NO: 448) | 1 | 294 |

[1918] Segment cluster T86235_N39 (SEQ ID NO:453) according to the present invention is supported by 9 libraries. The number of libraries was determined as previously described. This segment can be found in the following transcript(s): T86235_T13 (SEQ ID NO:444), T86235_T15 (SEQ ID NO:445) and T86235_T32 (SEQ ID NO:448). Table 178 below describes the starting and ending position of this segment on each transcript.

TABLE 178
Segment location on transcripts

| | Segment | Segment |
|---|---|---|
| Transcript name | starting position | ending position |
| T86235_T13 (SEQ ID NO: 444) | 1462 | 1863 |
| T86235_T15 (SEQ ID NO: 445) | 1462 | 1863 |
| T86235_T32 (SEQ ID NO: 448) | 568 | 969 |

[1919] Segment cluster T86235_N41 (SEQ ID NO:454) according to the present invention is supported by 4 libraries. The number of libraries was determined as previously described. This segment can be found in the following transcript(s): T86235_T13 (SEQ ID NO:444) and T86235_T5 (SEQ ID NO:440). Table 179 below describes the starting and ending position of this segment on each transcript.

TABLE 179
Segment location on transcripts

| | Segment | Segment |
|---|---|---|
| Transcript name | starting position | ending position |
| T86235_T13 (SEQ ID NO: 444) | 1999 | 2151 |
| T86235_T5 (SEQ ID NO: 440) | 1597 | 1749 |

[1920] Segment cluster T86235_N53 (SEQ ID NO:455) according to the present invention is supported by 22 libraries. The number of libraries was determined as previously described. This segment can be found in the following transcript(s): T86235_T15 (SEQ ID NO:445), T86235_T18 (SEQ ID NO:446), T86235_T6 (SEQ ID NO:441) and T86235_T7 (SEQ ID NO:442). Table 180 below describes the starting and ending position of this segment on each transcript.

TABLE 180
Segment location on transcripts

| | Segment | Segment |
|---|---|---|
| Transcript name | starting position | ending position |
| T86235_T15 (SEQ ID NO: 445) | 2798 | 3067 |
| T86235_T18 (SEQ ID NO: 446) | 2309 | 2578 |
| T86235_T6 (SEQ ID NO: 441) | 2309 | 2578 |
| T86235_T7 (SEQ ID NO: 442) | 2396 | 2665 |

[1921] Segment cluster T86235_N55 (SEQ ID NO:456) (T86235_N55 (SEQ ID NO:456) segment name in experimental results is T86235_seg 44 (SEQ ID NO: 285)) according to the present invention is supported by 5 libraries. The number of libraries was determined as previously described. This segment can be found in the following transcript(s): T86235_T11 (SEQ ID NO:443) and T86235_T18 (SEQ ID NO:446). Table 181 below describes the starting and ending position of this segment on each transcript.

TABLE 181
Segment location on transcripts

| | Segment | Segment |
|---|---|---|
| Transcript name | starting position | ending position |
| T86235_T11 (SEQ ID NO: 443) | 2503 | 2667 |
| T86235_T18 (SEQ ID NO: 446) | 2773 | 2937 |

[1922] According to an optional embodiment of the present invention, short segments related to the above cluster are also provided. These segments are up to about 120 bp in length, and so are included in a separate description.

[1923] Segment cluster T86235 N12 (SEQ ID NO:457) according to the present invention is supported by 9 libraries. The number of libraries was determined as previously described. This segment can be found in the following transcript(s): T86235_T36 (SEQ ID NO:449). Table 182 below describes the starting and ending position of this segment on each transcript.

TABLE 182
Segment location on transcripts

| | Segment | Segment |
|---|---|---|
| Transcript name | starting position | ending position |
| T86235_T36 (SEQ ID NO: 449) | 635 | 739 |

[1924] Segment cluster T86235_N13 (SEQ ID NO:458) according to the present invention is supported by 10 libraries. The number of libraries was determined as previously described. This segment can be found in the following transcript(s): T86235_T36 (SEQ ID NO:449). Table 183 below describes the starting and ending position of this segment on each transcript.

TABLE 183
Segment location on transcripts

| | Segment | Segment |
|---|---|---|
| Transcript name | starting position | ending position |
| T86235_T36 (SEQ ID NO: 449) | 740 | 751 |

[1925] Segment cluster T86235_N14 (SEQ ID NO:459) according to the present invention is supported by 18 libraries. The number of libraries was determined as previously described. This segment can be found in the following transcript(s): T86235_T36 (SEQ ID NO:449). Table 184 below describes the starting and ending position of this segment on each transcript.

TABLE 184
Segment location on transcripts

| | Segment | Segment |
|---|---|---|
| Transcript name | starting position | ending position |
| T86235_T36 (SEQ ID NO: 449) | 752 | 808 |

[1926] Segment cluster T86235_N46 (SEQ ID NO:460) according to the present invention is supported by 30 libraries. The number of libraries was determined as previously described. This segment can be found in the following transcript(s): T86235_T15 (SEQ ID NO:445) and T86235_T7 (SEQ ID NO:442). Table 185 below describes the starting and ending position of this segment on each transcript.

TABLE 185
Segment location on transcripts

| | Segment | Segment |
|---|---|---|
| Transcript name | starting position | ending position |
| T86235_T15 (SEQ ID NO: 445) | 2428 | 2514 |
| T86235_T7 (SEQ ID NO: 442) | 2026 | 2112 |

[1927] Segment cluster T86235_N47 (SEQ ID NO:461) according to the present invention is supported by 33 libraries. The number of libraries was determined as previously described. This segment can be found in the following transcript(s): T86235_T11 (SEQ ID NO:443), T86235_T13 (SEQ ID NO:444), T86235_T15 (SEQ ID NO:445), T86235_T18 (SEQ ID NO:446), T86235_T26 (SEQ ID NO:447), T86235_T32 (SEQ ID NO:448), T86235_T5 (SEQ ID NO:440), T86235_T6 (SEQ ID NO:441) and T86235_T7 (SEQ ID NO:442). Table 186 below describes the starting and ending position of this segment on each transcript.

TABLE 186
Segment location on transcripts

| | Segment | Segment |
|---|---|---|
| Transcript name | starting position | ending position |
| T86235_T11 (SEQ ID NO: 443) | 2026 | 2037 |
| T86235_T13 (SEQ ID NO: 444) | 2581 | 2592 |
| T86235_T15 (SEQ ID NO: 445) | 2515 | 2526 |
| T86235_T18 (SEQ ID NO: 446) | 2026 | 2037 |
| T86235_T26 (SEQ ID NO: 447) | 1526 | 1537 |
| T86235_T32 (SEQ ID NO: 448) | 1534 | 1545 |
| T86235_T5 (SEQ ID NO: 440) | 2179 | 2190 |
| T86235_T6 (SEQ ID NO: 441) | 2026 | 2037 |
| T86235_T7 (SEQ ID NO: 442) | 2113 | 2124 |

[1928] Expression of Homo sapiens trophinin associated protein (tastin) (TROAP) transcripts detectable by or according to segments as described below was measured by real time PCR: seg44—T86235_seg44 (SEQ ID NO: 285) amplicon and primers T86235_seg44F (SEQ ID NO: 283) and T86235_seg44R (SEQ ID NO: 284); seg46-47WT—T86235_seg46-47WT (SEQ ID NO: 288) amplicon and primers T86235_seg46-47WTF (SEQ ID NO: 286) and T86235_seg46-47WTR (SEQ ID NO: 287).

[1929] The sequences of the corresponding amplicons and primers are given below:

Forward Primer T86235_seg44F (SEQ ID NO: 283):
AGACTCCAACCCACAGCCC
Reverse Primer T86235_seg44R (SEQ ID NO: 284):
CAGCTCAGCCAACCTTGCA
Amplicon T86235_seg44 (SEQ ID NO: 285):
AGACTCCAACCCACAGCCCAGCTGTGGCTGCACAGTGAGCCTGATGGGAG
GTGGGGAACAGGGACAGGGGGCCACCTGGGCTTCTTCACAGAGAGGTCAG
CAGGAAGGCTTGGCTACAGTGCAAGGTTGGCTGAGCTG
Forward Primer T86235_seg46-47WTF
(SEQ ID NO: 286):
GTACGTGAGCCCTGCCCT
Reverse Primer T86235_seg46-47WTR
(SEQ ID NO: 287):
CTCAAGCTGTTCCTGGCGA
Amplicon T86235_seg46-47WT (SEQ ID NO: 288):
GTACCTGAGCCCTGCCCTCCAGCAGAACCCAGGCCCCTAGAGTCCTACTG
TAGGATTGAGCCTGAGATACCGGAGTCCTCTCGCCAGGAACAGCTTGAG

[1930] The below table 187 gives a conversion between the terms for segments (nodes) in the experimental results and those listed earlier in the description for cluster T86235:

TABLE 187

| Segment name for | Segment name within the description |
|---|---|
| T86235 in experimental results | for cluster T86235 report |
| seg 44 (SEQ ID NO: 285) | seg 55 |
| 46-47WT (SEQ ID NO: 288) | 46-47WT |

Expression of Homo sapiens Trophinin Associated Protein (tastin) (TROAP) T86235 Transcripts which are Detectable by Amplicon as Depicted in Sequence Name T86235_seg44 (SEQ ID NO: 285) in Normal and Cancerous Breast Tissues

[1931] Expression of Homo sapiens trophinin associated protein (tastin) (TROAP) transcripts detectable by or according to seg44—T86235_seg44 (SEQ ID NO: 285) amplicon and primers T86235_seg44F (SEQ ID NO: 283) and T86235_seg44R (SEQ ID NO: 284) was measured by real time PCR. In parallel the expression of four housekeeping genes—G6PD (GenBank Accession No. NM_{—}000402 (SEQ ID NO:339); G6PD amplicon (SEQ ID NO: 311)), HPRT1 (GenBank Accession No. NM_{—}000194 (SEQ ID NO:337); amplicon—HPRT1-amplicon (SEQ ID NO: 305) (SEQ ID NO: 305)), PBGD (GenBank Accession No. BC019323 (SEQ ID NO:336); amplicon—PBGD-amplicon (SEQ ID NO: 302)) and SDHA (GenBank Accession No. NM_{—}004168 (SEQ ID NO:335); amplicon—SDHA-amplicon (SEQ ID NO:299)) was measured similarly. For each RT sample, the expression of the above amplicon was normalized to the geometric mean of the quantities of the housekeeping genes. The normalized quantity of each RT sample was then divided by the median of the quantities of the normal post-mortem (PM) samples (sample numbers 57, 59, 60, 63, 66, 64, 56, 65, 67 and 58, Table 1_{—}3 above), to obtain a value of fold up-regulation for each sample relative to the median of the normal PM samples.

[1932] FIG. 79A is a histogram showing over expression of the Homo sapiens trophinin associated protein (tastin) (TROAP) transcripts detectable by or according to T86235_seg44 (SEQ ID NO: 285) in cancerous Breast samples relative to the normal samples.

[1933] As is evident from FIG. 79A, the expression of Homo sapiens trophinin associated protein (tastin) (TROAP) transcripts detectable by the above amplicon in cancer samples was higher than in the non-cancerous samples (sample numbers 57, 59, 60, 63, 66, 64, 56, 65, 67 and 58, Table 1_{—}3 above). Notably an over-expression of at least 5 fold was found in 5 out of 28 adenocarcinoma samples.

[1934] Primer pairs are also optionally and preferably encompassed within the present invention; for example, for the above experiment, the following primer pair was used as a non-limiting illustrative example only of a suitable primer pair: T86235_seg44F (SEQ ID NO: 283) forward primer; and T86235_seg44R (SEQ ID NO: 284) reverse primer.

[1935] The present invention also preferably encompasses any amplicon obtained through the use of any suitable primer pair; for example, for the above experiment, the following amplicon was obtained as a non-limiting illustrative example only of a suitable amplicon: T86235_seg44 (SEQ ID NO: 285).

[1936] Expression of Homo sapiens trophinin associated protein (tastin) (TROAP) transcripts detectable by or according to seg44—T86235_seg44 (SEQ ID NO: 285) amplicon and primers T86235_seg44F (SEQ ID NO: 283) and T86235_seg44R (SEQ ID NO: 284) was further measured by real time PCR using enlarged panel as shown in Table 1_{—}7. In parallel the expression of four housekeeping genes—G6PD (GenBank Accession No. NM_{—}000402 (SEQ ID NO:339); G6PD amplicon (SEQ ID NO: 311)), RPL19 (GenBank Accession No. NM_{—}000981 (SEQ ID NO:342); RPL19 amplicon (SEQ ID NO: 320)), PBGD (GenBank Accession No. BC019323 (SEQ ID NO:336); amplicon—PBGD-amplicon (SEQ ID NO: 302)) and SDHA (GenBank Accession No. NM_{—}004168 (SEQ ID NO:335); amplicon—SDHA-amplicon (SEQ ID NO:299)) was measured similarly. For each RT sample, the expression of the above amplicon was normalized to the normalization factor calculated from the expression of these house keeping genes as described in normalization method 2 in the “materials and methods” section. The normalized quantity of each RT sample was then divided by the median of the quantities of the normal samples (sample numbers 43, 45, 46, 47, 48, 49, 50, 51, 52, 54, 56, 58, 59, 60, 61, 62, 63, 64, 65, 66, 67, 68 and 69, Table 1_{—}7 above), to obtain a value of fold up-regulation for each sample relative to the median of the normal samples.

[1937] FIG. 79B is a histogram showing over expression of the Homo sapiens trophinin associated protein (tastin) (TROAP) transcripts in cancerous Breast samples relative to the normal samples.

[1938] As is evident from FIG. 79B, the expression of Homo sapiens trophinin associated protein (tastin) (TROAP) transcripts detectable by the above amplicon in cancer samples was significantly higher than in the non-cancerous samples (sample numbers 39-42, 43, 45, 46, 47, 48, 49, 50, 51, 52, 54, 56, 58, 59, 60, 61, 62, 63, 64, 65, 66, 67, 68 and 69, Table 1_{—}7 above). Notably an over-expression of at least 7 fold was found in 28 out of 53 adenocarcinoma samples.

[1939] Statistical analysis was applied to verify the significance of these results, as described below.

[1940] The P value for the difference in the expression levels of Homo sapiens trophinin associated protein (tastin) (TROAP) transcripts detectable by the above amplicon in Breast cancer samples versus the normal tissue samples was determined by T test as 1.50e-03.

[1941] Threshold of 7 fold over expression was found to differentiate between cancer and normal samples with P value of 3.11e-07 as checked by exact Fisher test.

[1942] The above values demonstrate statistical significance of the results.

[1943] Primer pairs are also optionally and preferably encompassed within the present invention; for example, for the above experiment, the following primer pair was used as a non-limiting illustrative example only of a suitable primer pair: T86235_seg44F (SEQ ID NO: 283) forward primer; and T86235_seg44R (SEQ ID NO: 284) reverse primer.

[1944] The present invention also preferably encompasses any amplicon obtained through the use of any suitable primer pair; for example, for the above experiment, the following amplicon was obtained as a non-limiting illustrative example only of a suitable amplicon: T86235_seg44 (SEQ ID NO: 285).

Expression of Homo sapiens Trophinin Associated Protein (Tastin) (TROAP) T86235 Transcripts which are Detectable by Amplicon as Depicted in Sequence Name T86235_seg44 (SEQ ID NO: 285) in Normal and Cancerous Ovary Tissues

[1945] Expression of Homo sapiens trophinin associated protein (tastin) (TROAP) transcripts detectable by or according to seg44—T86235_seg44 (SEQ ID NO: 285) amplicon and primers T86235_seg44F (SEQ ID NO: 283) and T86235_seg44R (SEQ ID NO: 284) was measured by real time PCR. In parallel the expression of four housekeeping genes—SDHA (GenBank Accession No. NM_{—}004168 (SEQ ID NO:335); amplicon—SDHA-amplicon (SEQ ID NO:299)), HPRT1 (GenBank Accession No. NM_{—}000194 (SEQ ID NO:337); amplicon—HPRT1-amplicon (SEQ ID NO: 305) (SEQ ID NO: 305)), PBGD (GenBank Accession No. BC019323 (SEQ ID NO:336); amplicon—PBGD-amplicon (SEQ ID NO: 302)) and GAPDH (GenBank Accession No. BC026907 (SEQ ID NO:338); GAPDH amplicon (SEQ ID NO: 308)) was measured similarly. For each RT sample, the expression of the above amplicon was normalized to the geometric mean of the quantities of the housekeeping genes. The normalized quantity of each RT sample was then divided by the median of the quantities of the normal post-mortem (PM) samples (sample numbers 45, 71 and 48, Table 1_{—}1 above), to obtain a value of fold up-regulation for each sample relative to the median of the normal PM samples.

[1946] FIG. 80A is a histogram showing over expression of the Homo sapiens trophinin associated protein (tastin) (TROAP) transcripts detectable by or according to T86235_seg44 (SEQ ID NO: 285) in cancerous Ovary samples relative to the normal samples.

[1947] As is evident from FIG. 80A, the expression of Homo sapiens trophinin associated protein (tastin) (TROAP) transcripts detectable by the above amplicon in adenocarcinoma samples was higher than in the non-cancerous samples (sample numbers 45, 71 and 48, Table 1_{—}1 above). Notably an over-expression of at least 5 fold was found in 25 out of 43 adenocarcinoma samples, specifically in 20 out of 30 serous carcinoma samples and in 3 out of 6 mucinous carcinoma samples.

[1948] Statistical analysis was applied to verify the significance of these results, as described below.

[1949] The P value for the difference in the expression levels of Homo sapiens trophinin associated protein (tastin) (TROAP) transcripts detectable by the above amplicon in Ovary serous carcinoma samples versus the normal tissue samples was determined by T test as 8.05e-006. The P value for the difference in the expression levels of Homo sapiens trophinin associated protein (tastin) (TROAP) transcripts detectable by the above amplicon in Ovary mucinous carcinoma samples versus the normal tissue samples was determined by T test as 2.55e-002. The P value for the difference in the expression levels of Homo sapiens trophinin associated protein (tastin) (TROAP) transcripts detectable by the above amplicon in all ovary adenocarcinoma samples versus the normal tissue samples was determined by T test as 1.00e-006.

[1950] The above values demonstrate statistical significance of the results.

[1951] Primer pairs are also optionally and preferably encompassed within the present invention; for example, for the above experiment, the following primer pair was used as a non-limiting illustrative example only of a suitable primer pair: T86235_seg44F (SEQ ID NO: 283) forward primer; and T86235_seg44R (SEQ ID NO: 284) reverse primer.

[1952] The present invention also preferably encompasses any amplicon obtained through the use of any suitable primer pair; for example, for the above experiment, the following amplicon was obtained as a non-limiting illustrative example only of a suitable amplicon: T86235_seg44 (SEQ ID NO: 285).

[1953] Expression of sapiens trophinin associated protein (tastin) (TROAP) transcripts detectable by or according to seg44—T86235_seg44 (SEQ ID NO: 285) amplicon and primers T86235_seg44F (SEQ ID NO: 283) and T86235_seg44R (SEQ ID NO: 284) was further measured by real time PCR using enlarged panel as shown in Table 1_{—}5. In parallel the expression of three housekeeping genes—SDHA (GenBank Accession No. NM_{—}004168 (SEQ ID NO:335); amplicon—SDHA-amplicon (SEQ ID NO:299)), HPRT1 (GenBank Accession No. NM_{—}000194 (SEQ ID NO:337); amplicon—HPRT1-amplicon (SEQ ID NO: 305) (SEQ ID NO: 305)), G6PD (GenBank Accession No. NM_{—}000402 (SEQ ID NO:339); G6PD amplicon (SEQ ID NO: 311)) was measured similarly. For each RT sample, the expression of the above amplicon was normalized to the normalization factor calculated from the expression of these house keeping genes as described in normalization method 2 in the “materials and methods” section. The normalized quantity of each RT sample was then divided by the median of the quantities of the normal samples (sample numbers 52, 53, 54, 55, 56, 57, 58, 59, 60, 61, 62, 63, 64, 65, 66, 67, 68, 69, 70, 71, 72, 73, 74, 75, 76, 77 and 78, Table 1_{—}5 above), to obtain a value of fold up-regulation for each sample relative to the median of the normal samples.

[1954] FIG. 80B is a histogram showing over expression of the sapiens trophinin associated protein (tastin) (TROAP) transcripts in cancerous Ovary samples relative to the normal samples.

[1955] As is evident from FIG. 80B, the expression of sapiens trophinin associated protein (tastin) (TROAP) transcripts detectable by the above amplicon in adenocarcinoma samples was significantly higher than in the non-cancerous samples (sample numbers 41, 43-78, Table 1_{—}5 above). Notably an over-expression of at least 5 fold was found in 46 out of 74 adenocarcinoma samples, specifically in 26 out of 38 serous carcinoma samples, in 9 out of 10 endometroid type adenocarcinoma, in 4 out of 12 mucinous carcinoma samples.

[1956] Statistical analysis was applied to verify the significance of these results, as described below.

[1957] The P value for the difference in the expression levels of sapiens trophinin associated protein (tastin) (TROAP) transcripts detectable by the above amplicon in Ovary adenocarcinoma samples versus the normal tissue samples was determined by T test as 1.21e-13. The P value for the difference in the expression levels of sapiens trophinin associated protein (tastin) (TROAP) transcripts detectable by the above amplicon in Ovary serous carcinoma samples versus the normal tissue samples was determined by T test as 3.60e-09. The P value for the difference in the expression levels of sapiens trophinin associated protein (tastin) (TROAP) transcripts detectable by the above amplicon in Ovary mucinous carcinoma samples versus the normal tissue samples was determined by T test as 9.40e-03.

[1958] Threshold of 5 fold over expression was found to differentiate between adenocarcinoma and normal samples with P value of 5.08e-12 as checked by exact Fisher test. Threshold of 5 fold over expression was found to differentiate between serous carcinoma and normal samples with P value of 2.68e-11 as checked by exact Fisher test. Threshold of 5 fold over expression was found to differentiate between mucinous carcinoma and normal samples with P value of 2.34e-03 as checked by exact Fisher test.

[1959] The above values demonstrate statistical significance of the results.

[1960] Primer pairs are also optionally and preferably encompassed within the present invention; for example, for the above experiment, the following primer pair was used as a non-limiting illustrative example only of a suitable primer pair: T86235_seg44F (SEQ ID NO: 283) forward primer; and T86235_seg44R (SEQ ID NO: 284) reverse primer.

[1961] The present invention also preferably encompasses any amplicon obtained through the use of any suitable primer pair; for example, for the above experiment, the following amplicon was obtained as a non-limiting illustrative example only of a suitable amplicon: T86235_seg44 (SEQ ID NO: 285).

Expression of Homo sapiens Trophinin Associated Protein (tastin) (TROAP) T86235 Transcripts which are Detectable by Amplicon as Depicted in Sequence Name T86235_seg44 (SEQ ID NO: 285) in Different Normal Tissues

[1962] Expression of Homo sapiens trophinin associated protein (tastin) (TROAP) transcripts detectable by or according to seg44—T86235_seg44 (SEQ ID NO: 285) amplicon and primers T86235_seg44F (SEQ ID NO: 283) and T86235_seg44R (SEQ ID NO: 284) was measured by real time PCR. In parallel the expression of four housekeeping genes—SDHA (GenBank Accession No. NM_{—}004168 (SEQ ID NO:335); amplicon—SDHA-amplicon (SEQ ID NO:299)), Ubiquitin (GenBank Accession No. BC000449 (SEQ ID NO:341); amplicon—Ubiquitin-amplicon (SEQ ID NO: 317)), RPL19 (GenBank Accession No. NM_{—}000981 (SEQ ID NO:342); RPL19 amplicon (SEQ ID NO: 320)) and TATA box (GenBank Accession No. NM_{—}003194 (SEQ ID NO:343); TATA amplicon (SEQ ID NO: 323)) was measured similarly. For each RT sample, the expression of the above amplicon was normalized to the geometric mean of the quantities of the housekeeping genes. The normalized quantity of each RT sample was then divided by the median of the quantities of the lung samples (sample numbers 15, 16 and 17, Table 1_{—}9 above), to obtain a value of relative expression of each sample relative to the median of the lung samples. FIG. 81A shows expression of Homo sapiens trophinin associated protein (tastin) (TROAP) T86235 transcripts which are detectable by amplicon as depicted in sequence name T86235_seg44 (SEQ ID NO: 285) in different normal tissues.

[1963] Expression of Homo sapiens trophinin associated protein (tastin) (TROAP) transcripts detectable by or according to seg44—T86235_seg44 (SEQ ID NO: 285) amplicon and primers T86235_seg44F (SEQ ID NO: 283) and T86235_seg44R (SEQ ID NO: 284) was further measured by real time PCR using updated panel as shown in Table 1_{—}10. In parallel the expression of three housekeeping genes—SDHA (GenBank Accession No. NM_{—}004168 (SEQ ID NO:335); amplicon—SDHA-amplicon (SEQ ID NO:299)), Ubiquitin (GenBank Accession No. BC000449 (SEQ ID NO:341); amplicon—Ubiquitin-amplicon (SEQ ID NO: 317)), and TATA box (GenBank Accession No. NM_{—}003194 (SEQ ID NO:343); TATA amplicon (SEQ ID NO: 323)) was measured similarly. For each RT sample, the expression of the above amplicon was normalized to the normalization factor calculated from the expression of these house keeping genes as described in normalization method 2 in the “materials and methods” section. The normalized quantity of each RT sample was then divided by the median of the quantities of:
[1964] A. The Lung samples (sample numbers 26, 28, 29 and 30, Table 1_{—}10 above), to obtain a value of relative expression of each sample relative to the median of the Lung samples—as presented in FIG. 81B
[1965] B. The ovary samples (sample numbers 31-34, Table 1_{—}10 above), to obtain a value of relative expression of each sample relative to the median of the Ovary samples—as presented in FIG. 81C.
[1966] C. The breast samples (sample numbers 41-43, Table 1_{—}10 above), to obtain a value of relative expression of each sample relative to the median of the Breast samples—as presented in FIG. 81D.
   Expression of Homo sapiens Trophinin Associated Protein (tastin) (TROAP) T86235 Transcripts which are Detectable by Amplicon as Depicted in Sequence Name T86235_seg46-47WT (SEQ ID NO: 288) in Normal and Cancerous Breast Tissues

[1967] Expression of Homo sapiens trophinin associated protein (tastin) (TROAP) transcripts detectable by or according to seg46-47WT-T86235_seg46-47WT (SEQ ID NO: 288) amplicon and primers T86235_seg46-47WTF (SEQ ID NO: 286) and T86235_seg46-47WTR (SEQ ID NO: 287) was measured by real time PCR. In parallel the expression of four housekeeping genes—G6PD (GenBank Accession No. NM_{—}000402 (SEQ ID NO:339); G6PD amplicon (SEQ ID NO: 311)), HPRT1 (GenBank Accession No. NM_{—}000194 (SEQ ID NO:337); amplicon—HPRT1-amplicon (SEQ ID NO: 305) (SEQ ID NO: 305)), PBGD (GenBank Accession No. BC019323 (SEQ ID NO:336); amplicon—PBGD-amplicon (SEQ ID NO: 302)) and SDHA (GenBank Accession No. NM_{—}004168 (SEQ ID NO:335); amplicon—SDHA-amplicon (SEQ ID NO:299)) was measured similarly. For each RT sample, the expression of the above amplicon was normalized to the geometric mean of the quantities of the housekeeping genes. The normalized quantity of each RT sample was then divided by the median of the quantities of the normal post-mortem (PM) samples (sample numbers 57, 59, 60, 63, 66, 64, 56, 65, 67 and 58, Table 1_{—}3 above), to obtain a value of fold up-regulation for each sample relative to the median of the normal PM samples.

[1968] FIG. 82A is a histogram showing over expression of the Homo sapiens trophinin associated protein (tastin) (TROAP) transcripts detectable by or according to T86235_seg46-47WT (SEQ ID NO: 288) in cancerous Breast samples relative to the normal samples.

[1969] As is evident from FIG. 82A, the expression of Homo sapiens trophinin associated protein (tastin) (TROAP) transcripts detectable by the above amplicon in cancer samples was significantly higher than in the non-cancerous samples (sample numbers 57, 59, 60, 63, 66, 64, 56, 65, 67 and 58, Table 1_{—}3 above). Notably an over-expression of at least 5 fold was found in 21 out of 28 adenocarcinoma samples.

[1970] Statistical analysis was applied to verify the significance of these results, as described below.

[1971] The P value for the difference in the expression levels of Homo sapiens trophinin associated protein (tastin) (TROAP) transcripts detectable by the above amplicon in Breast cancer samples versus the normal tissue samples was determined by T test as 3.22e-02.

[1972] Threshold of 5 fold over expression was found to differentiate between cancer and normal samples with P value of 3.66e-03 as checked by exact Fisher test.

[1973] The above values demonstrate statistical significance of the results.

[1974] Primer pairs are also optionally and preferably encompassed within the present invention; for example, for the above experiment, the following primer pair was used as a non-limiting illustrative example only of a suitable primer pair: T86235_seg46-47WTF (SEQ ID NO: 286) forward primer; and T86235_seg46-47WTR (SEQ ID NO: 287) reverse primer.

[1975] The present invention also preferably encompasses any amplicon obtained through the use of any suitable primer pair; for example, for the above experiment, the following amplicon was obtained as a non-limiting illustrative example only of a suitable amplicon: T86235_seg46-47WT (SEQ ID NO: 288).

[1976] Expression of Homo sapiens trophinin associated protein (tastin) (TROAP) transcripts detectable by or according to seg46-47WT—T86235_seg46-47WT (SEQ ID NO: 288) amplicon and primers T86235_seg46-47WTF (SEQ ID NO: 286) and T86235_seg46-47WTR (SEQ ID NO: 287) was further measured by real time PCR using enlarged panel as shown in Table 1_{—}7. In parallel the expression of four housekeeping genes—G6PD (GenBank Accession No. NM_{—}000402 (SEQ ID NO:339); G6PD amplicon (SEQ ID NO: 311)), RPL19 (GenBank Accession No. NM_{—}000981 (SEQ ID NO:342); RPL19 amplicon (SEQ ID NO: 320)), PBGD (GenBank Accession No. BC019323 (SEQ ID NO:336); amplicon—PBGD-amplicon (SEQ ID NO: 302)) and SDHA (GenBank Accession No. NM_{—}004168 (SEQ ID NO:335); amplicon—SDHA-amplicon (SEQ ID NO:299)) was measured similarly. For each RT sample, the expression of the above amplicon was normalized to the normalization factor calculated from the expression of these house keeping genes as described in normalization method 2 in the “materials and methods” section. The normalized quantity of each RT sample was then divided by the median of the quantities of the normal samples (sample numbers 43, 45, 46, 47, 48, 49, 50, 51, 52, 54, 56, 58, 59, 60, 61, 62, 63, 64, 65, 66, 67, 68 and 69, Table 1_{—}7 above), to obtain a value of fold up-regulation for each sample relative to the median of the normal samples.

[1977] FIG. 82B is a histogram showing over expression of the Homo sapiens trophinin associated protein (tastin) (TROAP) transcripts in cancerous Breast samples relative to the normal samples.

[1978] As is evident from FIG. 82B, the expression of Homo sapiens trophinin associated protein (tastin) (TROAP) transcripts detectable by the above amplicon in cancer samples was significantly higher than in the non-cancerous samples (sample numbers 39-42, 43, 45, 46, 47, 48, 49, 50, 51, 52, 54, 56, 58, 59, 60, 61, 62, 63, 64, 65, 66, 67, 68 and 69, Table 117 above). Notably an over-expression of at least 10 fold was found in 17 out of 53 adenocarcinoma samples.

[1979] Statistical analysis was applied to verify the significance of these results, as described below.

[1980] The P value for the difference in the expression levels of Homo sapiens trophinin associated protein (tastin) (TROAP) transcripts detectable by the above amplicon in Breast cancer samples versus the normal tissue samples was determined by T test as 1.20e-08.

[1981] Threshold of 5 fold over expression was found to differentiate between cancer and normal samples with P value of 3.18e-04 as checked by exact Fisher test.

[1982] The above values demonstrate statistical significance of the results.

[1983] Primer pairs are also optionally and preferably encompassed within the present invention; for example, for the above experiment, the following primer pair was used as a non-limiting illustrative example only of a suitable primer pair: T86235_seg46-47WTF (SEQ ID NO: 286) forward primer; and T86235_seg46-47WTR (SEQ ID NO: 287) reverse primer.

[1984] The present invention also preferably encompasses any amplicon obtained through the use of any suitable primer pair; for example, for the above experiment, the following amplicon was obtained as a non-limiting illustrative example only of a suitable amplicon: T86235_seg46-47WT (SEQ ID NO: 288).

Expression of Homo sapiens Trophinin Associated Protein (tastin) (TROAP) T86235 Transcripts which are Detectable by Amplicon as Depicted in Sequence Name T86235_seg46-47WT (SEQ ID NO: 288) in Normal and Cancerous Lung Tissues

[1985] Expression of Homo sapiens trophinin associated protein (tastin) (TROAP) transcripts detectable by or according to seg46-47WT—T86235_seg46-47WT (SEQ ID NO: 288) amplicon and primers T86235_seg46-47WTF (SEQ ID NO: 286) and T86235_seg46-47WTR (SEQ ID NO: 287) was measured by real time PCR. In parallel the expression of four housekeeping genes—HPRT1 (GenBank Accession No. NM_{—}000194 (SEQ ID NO:337); amplicon—HPRT1-amplicon (SEQ ID NO: 305) (SEQ ID NO: 305)), PBGD (GenBank Accession No. BC019323 (SEQ ID NO:336); amplicon—PBGD-amplicon (SEQ ID NO: 302)), SDHA (GenBank Accession No. NM_{—}004168 (SEQ ID NO:335); amplicon—SDHA-amplicon (SEQ ID NO:299)) and Ubiquitin (GenBank Accession No. BC000449 (SEQ ID NO:341); amplicon—Ubiquitin-amplicon (SEQ ID NO: 317)) was measured similarly. For each RT sample, the expression of the above amplicon was normalized to the geometric mean of the quantities of the housekeeping genes. The normalized quantity of each RT sample was then divided by the median of the quantities of the normal post-mortem (PM) samples (sample numbers 47, 48, 49, 50, 90, 91, 92, 93, 96, 97, 98 and 99, Table 1_{—}2 above), to obtain a value of fold up-regulation for each sample relative to the median of the normal PM samples.

[1986] FIG. 83A is a histogram showing over expression of the Homo sapiens trophinin associated protein (tastin) (TROAP) transcripts detectable by or according to T86235_seg46-47WT (SEQ ID NO: 288) in cancerous Lung samples relative to the normal samples.

[1987] As is evident from FIG. 83A, the expression of Homo sapiens trophinin associated protein (tastin) (TROAP) transcripts detectable by the above amplicon in non-small cell carcinoma and small cell carcinoma and non-small cell carcinoma samples was significantly higher than in the non-cancerous samples (sample numbers 47, 48, 49, 50, 90, 91, 92, 93, 96, 97, 98 and 99, Table 1_{—}2 above). Notably an over-expression of at least 5 fold was found in 19 out of 35 non-small cell carcinoma samples, specifically in 5 out of 15 adenocarcinoma samples, 11 out of 16 squamous cell carcinoma samples and 3 out of 4 large cell carcinoma samples, and in 8 out of 8 small cell carcinoma samples.

[1988] Statistical analysis was applied to verify the significance of these results, as described below.

[1989] The P value for the difference in the expression levels of Homo sapiens trophinin associated protein (tastin) (TROAP) transcripts detectable by the above amplicon in all Lung non-small cell carcinoma samples versus the normal tissue samples was determined by T test as 1.36e-08. The P value for the difference in the expression levels of Homo sapiens trophinin associated protein (tastin) (TROAP) transcripts detectable by the above amplicon in Lung adenocarcinoma samples versus the normal tissue samples was determined by T test as 6.93e-05. The P value for the difference in the expression levels of Homo sapiens trophinin associated protein (tastin) (TROAP) transcripts detectable by the above amplicon in Lung squamous cell carcinoma samples versus the normal tissue samples was determined by T test as 1.79e-05. The P value for the difference in the expression levels of Homo sapiens trophinin associated protein (tastin) (TROAP) transcripts detectable by the above amplicon in Lung small cell carcinoma samples versus the normal tissue samples was determined by T test as 9.27e-008.

[1990] Threshold of 5 fold over expression was found to differentiate between non-small cell carcinoma and normal samples with P value of 5.82e-04 as checked by exact Fisher test. Threshold of 5 fold over expression was found to differentiate between adenocarcinoma and normal samples with P value of 3.72e-02 as checked by exact Fisher test. Threshold of 5 fold over expression was found to differentiate between squamous cell carcinoma and normal samples with P value of 2.03e-04 as checked by exact Fisher test. Threshold of 5 fold over expression was found to differentiate between large cell carcinoma and normal samples with P value of 7.14e-03 as checked by exact Fisher test. Threshold of 5 fold over expression was found to differentiate between small cell carcinoma and normal samples with P value of 7.94e-06 as checked by exact Fisher test.

[1991] The above values demonstrate statistical significance of the results.

[1992] Primer pairs are also optionally and preferably encompassed within the present invention; for example, for the above experiment, the following primer pair was used as a non-limiting illustrative example only of a suitable primer pair: T86235_seg46-47WTF (SEQ ID NO: 286) forward primer; and T86235_seg46-47WTR (SEQ ID NO: 287) reverse primer.

[1993] The present invention also preferably encompasses any amplicon obtained through the use of any suitable primer pair; for example, for the above experiment, the following amplicon was obtained as a non-limiting illustrative example only of a suitable amplicon: T86235_seg46-47WT (SEQ ID NO: 288).

[1994] Expression of Homo sapiens trophinin associated protein (tastin) (TROAP) transcripts detectable by or according to seg46-47WT—T86235_seg46-47WT (SEQ ID NO: 288) amplicon and primers T86235_seg46-47WTF (SEQ ID NO: 286) and T86235_seg46-47WTR (SEQ ID NO: 287) was further measured by real time PCR using enlarged panel as shown in Table 1_{—}6. In parallel the expression of four housekeeping genes—HPRT1 (GenBank Accession No. NM_{—}000194 (SEQ ID NO:337); amplicon—HPRT1-amplicon (SEQ ID NO: 305) (SEQ ID NO: 305)), PBGD (GenBank Accession No. BC019323 (SEQ ID NO:336); amplicon—PBGD-amplicon (SEQ ID NO: 302)), SDHA (GenBank Accession No. NM_{—}004168 (SEQ ID NO:335); amplicon—SDHA-amplicon (SEQ ID NO:299)) and Ubiquitin (GenBank Accession No. BC000449 (SEQ ID NO:341); amplicon—Ubiquitin-amplicon (SEQ ID NO: 317)) was measured similarly. For each RT sample, the expression of the above amplicon was normalized to the normalization factor calculated from the expression of these house keeping genes as described in normalization method 2 in the “materials and methods” section. The normalized quantity of each RT sample was then divided by the median of the quantities of the normal samples (sample numbers 51-64, 69 and 70, Table 1_{—}6 above), to obtain a value of fold up-regulation for each sample relative to the median of the normal samples.

[1995] FIG. 83B is a histogram showing over expression of the above-indicated Homo sapiens trophinin associated protein (tastin) (TROAP) transcripts in cancerous Lung samples relative to the normal samples.

[1996] As is evident from FIG. 83B, the expression of Homo sapiens trophinin associated protein (tastin) (TROAP) transcripts detectable by the above amplicon in small cell carcinoma and non-small cell carcinoma samples was significantly higher than in the non-cancerous samples (sample numbers 51-64, 69 and 70, Table 1_{—}6 above). Notably an over-expression of at least 5 fold was found in 35 out of 57 non-small cell carcinoma samples, specifically in 6 out of 23 adenocarcinoma samples, in 20 out of 24 squamous cell carcinoma samples, and in 9 out of 10 large cell carcinoma samples, and also in 9 out of 9 small cell carcinoma samples.

[1997] Statistical analysis was applied to verify the significance of these results, as described below.

[1998] The P value for the difference in the expression levels of Homo sapiens trophinin associated protein (tastin) (TROAP) transcripts detectable by the above amplicon in Lung non-small cell carcinoma samples versus the normal tissue samples was determined by T test as 3.06E-11. The P value for the difference in the expression levels of Homo sapiens trophinin associated protein (tastin) (TROAP) transcripts detectable by the above amplicon in Lung adenocarcinoma samples versus the normal tissue samples was determined by T test as 4.91E-04. The P value for the difference in the expression levels of Homo sapiens trophinin associated protein (tastin) (TROAP) transcripts detectable by the above amplicon in Lung squamous cell carcinoma samples versus the normal tissue samples was determined by T test as 3.72E-08. The P value for the difference in the expression levels of Homo sapiens trophinin associated protein (tastin) (TROAP) transcripts detectable by the above amplicon in Lung large cell carcinoma samples versus the normal tissue samples was determined by T test as 2.20E-03. The P value for the difference in the expression levels of Homo sapiens trophinin associated protein (tastin) (TROAP) transcripts detectable by the above amplicon in Lung small cell carcinoma samples versus the normal tissue samples was determined by T test as 1.1 E-03.

[1999] Threshold of 5 fold over expression was found to differentiate between non-small cell carcinoma and normal samples with P value of 4.22E-06 as checked by exact Fisher test. Threshold of 5 fold over expression was found to differentiate between adenocarcinoma and normal samples with P value of 3.09E-02 as checked by exact Fisher test. Threshold of 5 fold over expression was found to differentiate between squamous cell carcinoma and normal samples with P value of 7.71E-08 as checked by exact Fisher test. Threshold of 5 fold over expression was found to differentiate between large cell carcinoma and normal samples with P value of 3.20E-06 as checked by exact Fisher test. Threshold of 5 fold over expression was found to differentiate between small cell carcinoma and normal samples with P value of 4.89E-07 as checked by exact Fisher test.

[2000] The above values demonstrate statistical significance of the results.

[2001] Primer pairs are also optionally and preferably encompassed within the present invention; for example, for the above experiment, the following primer pair was used as a non-limiting illustrative example only of a suitable primer pair: T86235_seg46-47WTF (SEQ ID NO: 286) forward primer; and T86235_seg46-47WTR (SEQ ID NO: 287) reverse primer.

[2002] The present invention also preferably encompasses any amplicon obtained through the use of any suitable primer pair; for example, for the above experiment, the following amplicon was obtained as a non-limiting illustrative example only of a suitable amplicon: T86235_seg46-47WT (SEQ ID NO: 288).

Expression of Homo sapiens Trophinin Associated Protein (tastin) (TROAP) T86235 Transcripts which are Detectable by Amplicon as Depicted in Sequence Name T86235_seg46-47WT (SEQ ID NO: 288) in Normal and Cancerous Ovary Tissues

[2003] Expression of Homo sapiens trophinin associated protein (tastin) (TROAP) transcripts detectable by or according to seg46-47WT—T86235_seg46-47WT (SEQ ID NO: 288) amplicon and primers T86235_seg46-47WTF (SEQ ID NO: 286) and T86235_seg46-47WTR (SEQ ID NO: 287) was measured by real time PCR. In parallel the expression of four housekeeping genes—SDHA (GenBank Accession No. NM_{—}004168 (SEQ ID NO:335); amplicon—SDHA-amplicon (SEQ ID NO:299)), HPRT1 (GenBank Accession No. NM_{—}000194 (SEQ ID NO:337); amplicon—HPRT1-amplicon (SEQ ID NO: 305) (SEQ ID NO: 305)), PBGD (GenBank Accession No. BC019323 (SEQ ID NO:336); amplicon—PBGD-amplicon (SEQ ID NO: 302)) and GAPDH (GenBank Accession No. BC026907 (SEQ ID NO:338); GAPDH amplicon (SEQ ID NO: 308)) was measured similarly. For each RT sample, the expression of the above amplicon was normalized to the geometric mean of the quantities of the housekeeping genes. The normalized quantity of each RT sample was then divided by the median of the quantities of the normal post-mortem (PM) samples (sample numbers 45, 46, 71 and 48, Table 1_{—}1 above), to obtain a value of fold up-regulation for each sample relative to the median of the normal PM samples.

[2004] FIG. 84A is a histogram showing over expression of the Homo sapiens trophinin associated protein (tastin) (TROAP) transcripts detectable by or according to T86235_seg46-47WT (SEQ ID NO: 288) in cancerous Ovary samples relative to the normal samples.

[2005] As is evident from FIG. 84A, the expression of Homo sapiens trophinin associated protein (tastin) (TROAP) transcripts detectable by the above amplicon in serous carcinoma and adenocarcinoma samples was higher than in the non-cancerous samples (sample numbers 45, 46, 71 and 48, Table 1_{—}1 above). Notably an over-expression of at least 5 fold was found in 11 out of 30 serous carcinoma samples.

[2006] Statistical analysis was applied to verify the significance of these results, as described below.

[2007] The P value for the difference in the expression levels of Homo sapiens trophinin associated protein (tastin) (TROAP) transcripts detectable by the above amplicon in Ovary serous carcinoma samples versus the normal tissue samples was determined by T test as 2.42e-05.

[2008] The above values demonstrate statistical significance of the results.

[2009] Primer pairs are also optionally and preferably encompassed within the present invention; for example, for the above experiment, the following primer pair was used as a non-limiting illustrative example only of a suitable primer pair: T86235_seg46-47WTF (SEQ ID NO: 286) forward primer; and T86235_seg46-47WTR (SEQ ID NO: 287) reverse primer.

[2010] The present invention also preferably encompasses any amplicon obtained through the use of any suitable primer pair; for example, for the above experiment, the following amplicon was obtained as a non-limiting illustrative example only of a suitable amplicon: T86235_seg46-47WT (SEQ ID NO: 288).

[2011] Expression of sapiens trophinin associated protein (tastin) (TROAP) transcripts detectable by or according to seg46-47WT—T86235_seg46-47WT (SEQ ID NO: 288) amplicon and primers T86235_seg46-47WTF (SEQ ID NO: 286) and T86235_seg46-47WTR (SEQ ID NO: 287) was further measured by real time PCR using enlarged panel as shown in Table 1_{—}5. In parallel the expression of three housekeeping genes—SDHA (GenBank Accession No. NM_{—}004168 (SEQ ID NO:335); amplicon—SDHA-amplicon (SEQ ID NO:299)), HPRT1 (GenBank Accession No. NM_{—}000194 (SEQ ID NO:337); amplicon—HPRT1-amplicon (SEQ ID NO: 305) (SEQ ID NO: 305)), G6PD (GenBank Accession No. NM_{—}000402 (SEQ ID NO:339); G6PD amplicon (SEQ ID NO: 311)) was measured similarly. For each RT sample, the expression of the above amplicon was normalized to the normalization factor calculated from the expression of these house keeping genes as described in normalization method 2 in the “materials and methods” section. The normalized quantity of each RT sample was then divided by the median of the quantities of the normal samples (sample numbers 52, 53, 54, 55, 56, 57, 58, 59, 60, 61, 62, 63, 64, 65, 66, 67, 68, 69, 70, 71, 72, 73, 74, 75, 76, 77 and 78, Table 1_{—}5 above), to obtain a value of fold up-regulation for each sample relative to the median of the normal samples.

[2012] FIG. 84B is a histogram showing over expression of the above-indicated sapiens trophinin associated protein (tastin) (TROAP) transcripts in cancerous Ovary samples relative to the normal samples.

[2013] As is evident from FIG. 84B, the expression of sapiens trophinin associated protein (tastin) (TROAP) transcripts detectable by the above amplicon in adenocarcinoma samples was significantly higher than in the non-cancerous samples (sample numbers 41, 43-78, Table 1_{—}5 above). Notably an over-expression of at least 5 fold was found in 57 out of 74 adenocarcinoma samples, specifically in 30 out of 38 serous carcinoma samples, in 9 out of 10 endometroid type adenocarcinoma, in 8 out of 12 mucinous carcinoma samples.

[2014] Statistical analysis was applied to verify the significance of these results, as described below.

[2015] The P value for the difference in the expression levels of sapiens trophinin associated protein (tastin) (TROAP) transcripts detectable by the above amplicon in Ovary adenocarcinoma samples versus the non-cancerous tissue samples was determined by T test as 4.44e-16. The P value for the difference in the expression levels of sapiens trophinin associated protein (tastin) (TROAP) transcripts detectable by the above amplicon in Ovary serous carcinoma samples versus the non-cancerous tissue samples was determined by T test as 2.88e-10. The P value for the difference in the expression levels of sapiens trophinin associated protein (tastin) (TROAP) transcripts detectable by the above amplicon in Ovary mucinous carcinoma samples versus the non-cancerous tissue samples was determined by T test as 9 3.48e-03.

[2016] Threshold of 5 fold over expression was found to differentiate between adenocarcinoma and non-cancerous samples with P value of 9.86e-14 as checked by exact Fisher test. Threshold of 5 fold over expression was found to differentiate between serous carcinoma and non-cancerous samples with P value of 2.12e-11 as checked by exact Fisher test. Threshold of 5 fold over expression was found to differentiate between mucinous carcinoma and non-cancerous samples with P value of 4.11e-05 as checked by exact Fisher test.

[2017] The above values demonstrate statistical significance of the results.

[2018] Primer pairs are also optionally and preferably encompassed within the present invention; for example, for the above experiment, the following primer pair was used as a non-limiting illustrative example only of a suitable primer pair: T86235_seg46-47WTF (SEQ ID NO: 286) forward primer; and T86235_seg46-47WTR (SEQ ID NO: 287) reverse primer.

[2019] The present invention also preferably encompasses any amplicon obtained through the use of any suitable primer pair; for example, for the above experiment, the following amplicon was obtained as a non-limiting illustrative example only of a suitable amplicon: T86235_seg46-47WT (SEQ ID NO: 288).

Expression of Homo sapiens Trophinin Associated Protein (tastin) (TROAP) T86235 Transcripts which are Detectable by Amplicon as Depicted in Sequence Name T86235_seg46-47WT (SEQ ID NO: 288) in Different Normal Tissues

[2020] Expression of Homo sapiens trophinin associated protein (tastin) (TROAP) transcripts detectable by or according to seg46-47WT—T86235_seg46-47WT (SEQ ID NO: 288) amplicon and primers T86235_seg46-47WTF (SEQ ID NO: 286) and T86235 seg46-47WTR (SEQ ID NO: 287) was measured by real time PCR. In parallel the expression of four housekeeping genes—SDHA (GenBank Accession No. NM_{—}004168 (SEQ ID NO:335); amplicon—SDHA-amplicon (SEQ ID NO:299)), Ubiquitin (GenBank Accession No. BC000449 (SEQ ID NO:341); amplicon—Ubiquitin-amplicon (SEQ ID NO: 317)), RPL19 (GenBank Accession No. NM_{—}000981 (SEQ ID NO:342); RPL19 amplicon (SEQ ID NO: 320)) and TATA box (GenBank Accession No. NM_{—}003194 (SEQ ID NO:343); TATA amplicon (SEQ ID NO: 323)) was measured similarly. For each RT sample, the expression of the above amplicon was normalized to the geometric mean of the quantities of the housekeeping genes. The normalized quantity of each RT sample was then divided by the median of the quantities of the lung samples (sample numbers 15, 16 and 17, Table 1_{—}9 above), to obtain a value of relative expression of each sample relative to the median of the lung samples. FIG. 85A shows expression of Homo sapiens trophinin associated protein (tastin) (TROAP) T86235 transcripts which are detectable by amplicon as depicted in sequence name T86235_seg46-47WT (SEQ ID NO: 288) in different normal tissues.

[2021] Expression of Homo sapiens trophinin associated protein (tastin) (TROAP) transcripts detectable by or according to seg46-47WT—T86235_seg46-47WT (SEQ ID NO: 288) amplicon and primers T86235_seg46-47WTF (SEQ ID NO: 286) and T86235_seg46-47WTR (SEQ ID NO: 287) was further measured by real time PCR using updated panel as shown in Table 1_{—}10. In parallel the expression of four housekeeping genes—SDHA (GenBank Accession No. NM_{—}004168 (SEQ ID NO:335); amplicon—SDHA-amplicon (SEQ ID NO:299)), Ubiquitin (GenBank Accession No. BC000449 (SEQ ID NO:341); amplicon—Ubiquitin-amplicon (SEQ ID NO: 317)), and TATA box (GenBank Accession No. NM_{—}003194 (SEQ ID NO:343); TATA amplicon (SEQ ID NO: 323)) was measured similarly. For each RT sample, the expression of the above amplicon was normalized to the normalization factor calculated from the expression of these house keeping genes as described in normalization method 2 in the “materials and methods” section. The normalized quantity of each RT sample was then divided by the median of the quantities of:

A. The Lung samples (sample numbers 26, 28, 29 and 30, Table 1_{—}10 above), to obtain a value of relative expression of each sample relative to the median of the Lung samples—as presented in FIG. 85B.
B. The ovary samples (sample numbers 31-34, Table 1_{—}10 above), to obtain a value of relative expression of each sample relative to the median of the Ovary samples—as presented in FIG. 85C.
C. The breast samples (sample numbers 41-43, Table 1_{—}10 above), to obtain a value of relative expression of each sample relative to the median of the Breast samples—as presented in FIG. 85D.
Expression of Homo sapiens Trophinin Associated Protein (tastin) (TROAP) T86235 Transcripts which are Detectable by Amplicon as Depicted in Sequence Name T86235_seg44 (SEQ ID NO: 285) in Normal and Cancerous Lung Tissues

[2022] Expression of Homo sapiens trophinin associated protein (tastin) (TROAP) transcripts detectable by or according to seg44—T86235_seg44 (SEQ ID NO: 285) amplicon and primers T86235_seg44F (SEQ ID NO: 283) and T86235_seg44R (SEQ ID NO: 284) was measured by real time PCR. In parallel the expression of four housekeeping genes—HPRT1 (GenBank Accession No. NM_{—}000194 (SEQ ID NO:337); amplicon—HPRT1-amplicon (SEQ ID NO: 305) (SEQ ID NO: 305)), PBGD (GenBank Accession No. BC019323 (SEQ ID NO:336); amplicon—PBGD-amplicon (SEQ ID NO: 302)), SDHA (GenBank Accession No. NM_{—}004168 (SEQ ID NO:335); amplicon—SDHA-amplicon (SEQ ID NO:299)) and Ubiquitin (GenBank Accession No. BC000449 (SEQ ID NO:341); amplicon—Ubiquitin-amplicon (SEQ ID NO: 317)) was measured similarly. For each RT sample, the expression of the above amplicon was normalized to the normalization factor calculated from the expression of these house keeping genes as described in normalization method 2 in the “materials and methods” section. The normalized quantity of each RT sample was then divided by the median of the quantities of the normal samples (sample numbers 51-64, 69 and 70, Table 1_{—}6 above), to obtain a value of fold up-regulation for each sample relative to the median of the normal samples.

[2023] FIG. 86 is a histogram showing over expression of the above-indicated Homo sapiens trophinin associated protein (tastin) (TROAP) transcripts in cancerous Lung samples relative to the normal samples.

[2024] As is evident from FIG. 86, the expression of Homo sapiens trophinin associated protein (tastin) (TROAP) transcripts detectable by the above amplicon in small cell carcinoma and non-small cell carcinoma samples was significantly higher than in the non-cancerous samples (sample numbers 51-64, 69 and 70, Table 1_{—}6 above). Notably an over-expression of at least 5 fold was found in 23 out of 57 non-small cell carcinoma samples, specifically in 3 out of 23 adenocarcinoma samples, in 14 out of 24 squamous cell carcinoma samples and in 6 out of 10 large cell carcinoma samples, and also in 9 out of 9 small cell carcinoma samples.

[2025] Statistical analysis was applied to verify the significance of these results, as described below.

[2026] The P value for the difference in the expression levels of Homo sapiens trophinin associated protein (tastin) (TROAP) transcripts detectable by the above amplicon in Lung squamous cell carcinoma samples versus the normal tissue samples was determined by T test as 1.64E-05. The P value for the difference in the expression levels of Homo sapiens trophinin associated protein (tastin) (TROAP) transcripts detectable by the above amplicon in Lung small cell carcinoma samples versus the normal tissue samples was determined by T test as 5.39E-03.

[2027] Threshold of 5 fold over expression was found to differentiate between non-small cell carcinoma and normal samples with P value of 9.34E-04 as checked by exact Fisher test. Threshold of 5 fold over expression was found to differentiate between squamous cell carcinoma and normal samples with P value of 8.45E-05 as checked by exact Fisher test. Threshold of 5 fold over expression was found to differentiate between large cell carcinoma and normal samples with P value of 9.12E-04 as checked by exact Fisher test. Threshold of 5 fold over expression was found to differentiate between small cell carcinoma and normal samples with P value of 4.89E-07 as checked by exact Fisher test.

[2028] The above values demonstrate statistical significance of the results.

[2029] Primer pairs are also optionally and preferably encompassed within the present invention; for example, for the above experiment, the following primer pair was used as a non-limiting illustrative example only of a suitable primer pair: T86235_seg44F (SEQ ID NO: 283) forward primer; and T86235_seg44R (SEQ ID NO: 284) reverse primer.

[2030] The present invention also preferably encompasses any amplicon obtained through the use of any suitable primer pair; for example, for the above experiment, the following amplicon was obtained as a non-limiting illustrative example only of a suitable amplicon: T86235_seg44 (SEQ ID NO: 285).

Expression of Homo sapiens Trophinin Associated Protein (tastin) (TROAP) T86235 Transcripts which are Detectable by Amplicon as Depicted in Sequence Name T86235_seg44 (SEQ ID NO: 285) in Normal and Cancerous Colon Tissues

[2031] Expression of Homo sapiens trophinin associated protein (tastin) (TROAP) transcripts detectable by or according to seg44, T86235_seg44 (SEQ ID NO: 285) amplicon and primers T86235_seg44F (SEQ ID NO: 283) T86235_seg44R (SEQ ID NO: 284) was measured by real time PCR. In parallel the expression of three housekeeping genes—PBGD (GenBank Accession No. BC019323 (SEQ ID NO:336); amplicon—PBGD-amplicon (SEQ ID NO: 302)), HPRT1 (GenBank Accession No. NM_{—}000194 (SEQ ID NO:337); amplicon—HPRT1-amplicon (SEQ ID NO: 305) (SEQ ID NO: 305)) and G6PD (GenBank Accession No. NM_{—}000402 (SEQ ID NO:339); G6PD amplicon (SEQ ID NO: 311)) was measured similarly. For each RT sample, the expression of the above amplicon was normalized to the normalization factor calculated from the expression of these house keeping genes as described in normalization method 2 in the “materials and methods” section. The normalized quantity of each RT sample was then divided by the median of the quantities of the normal samples (Sample Nos. 52, 42, 43, 44, 45, 46, 47, 48, 49, 50, 51, 53, 54, 55, 56, 57, 58, 59, 60, 61, 62, 63 and 64, Table 1_{—}8, above), to obtain a value of fold differential expression for each sample relative to the median of the normal samples.

[2032] In one experiment that was carried out no differential expression in the cancerous samples relative to the normal samples was observed.

[2033] Primer pairs are also optionally and preferably encompassed within the present invention; for example, for the above experiment, the following primer pair was used as a non-limiting illustrative example only of a suitable primer pair: T86235_seg44F (SEQ ID NO: 283) forward primer; and T86235_seg44R (SEQ ID NO: 284) reverse primer.

[2034] The present invention also preferably encompasses any amplicon obtained through the use of any suitable primer pair; for example, for the above experiment, the following amplicon was obtained as a non-limiting illustrative example only of a suitable amplicon: T86235_seg44 (SEQ ID NO: 285).

[2035] It is appreciated that certain features of the invention, which are, for clarity, described in the context of separate embodiments, may also be provided in combination in a single embodiment. Conversely, various features of the invention, which are, for brevity, described in the context of a single embodiment, may also be provided separately or in any suitable subcombination.

[2036] Although the invention has been described in conjunction with specific embodiments thereof, it is evident that many alternatives, modifications and variations will be apparent to those skilled in the art. Accordingly, it is intended to embrace all such alternatives, modifications and variations that fall within the spirit and broad scope of the appended claims. All publications, patents and patent applications mentioned in this specification are herein incorporated in their entirety by reference into the specification, to the same extent as if each individual publication, patent or patent application was specifically and individually indicated to be incorporated herein by reference. In addition, citation or identification of any reference in this application shall not be construed as an admission that such reference is available as prior art to the present invention.

The application's sequence listing, which the Patent Office published only in electronic form, follows.

SEQUENCE LISTING (534 sequences)

SEQ ID NO: 1 - DNA, 1998 bp, Homo sapiens
ggtggcccagagcaagggcaagtttcgcccgggacccgcccagctggccgggagccagtagcagggaagggccggctggcgcgagcaccgcccacgcggagccatgggggcggggcctgggcgggggcggggccgcggccgagggcggggcagggaggcagcatgctaaaccgggtgcgctcggccgtggcgcacctggtgagctccgggggcgctccgcctccgcgccccaaatccccggacctgcccaacgccgcctcggcgccgcccgccgccgctccagaagcgcccaggagccctcccgcgaaggctgggagcgggagcgcgacgcccgcgaaggctgttgaggctcgagcgagcttctccagaccgacctttctgcagctgagccccggggggctgcgacgcgccgatgaccacgcgggccgggctgtgcaaagccccccggacacgggccgccgcctgccctggagcacaggctacgccgaggtcatcaatgctggcaagagtcggcacaatgaggaccaggcttgctgtgaagtggtgtatgtggaaggtcggaggagtgttacaggagtacctagggagcctagccgaggccagggactctgcttctactactggggcctatttgatgggcatgcagggggcggagctgctgaaatggcctcacggctcctgcatcgccatatccgagagcagctaaaggacctggtagagatacttcaggacccttcgccaccacccctctgcctcccaaccactccggggaccccagattcctccgatccctctcacttgcttggccctcagtcctgctggtcttcacagaaggaagtgagccacgagagcctggtagtgggggccattgagaatgccttccagctcatggatgagcagatggcccgggagcggcgtggccaccaagtggaggggggctgctgtgcactggttgtgatctacctgctaggcaaggtgtacgtggccaatgcaggcgatagcagggccatcattgtccggaatggtgaaatcattccaatgtcccgggagtttaccccggagactgagcgccagcgtcttcagctgcttggcttcctgaaaccagagctgctaggcagtgaattcacccaccttgagttcccccgcagagttctgcccaaggagctggggcagaggatgttgtaccgggaccagaacatgaccggctgggcctacaaaaagatcgagctggaggatctcaggtttcctctggtctgtggggagggcaaaaaggctcgggtgatggccaccattggggtgacccgaggcttgggagaccacagccttaaggtctgcagttccaccctgcccatcaagccctttctctcctgcttccctgaggtacgagtgtatgacctgacacaatatgagcactgcccagatgatgtgctagtcctgggaacagatggcctgtgggatgtcactactgactgtgaggtagctgccactgtggacagggtgctgtcggcctatgagcctaatgaccacagcaggtaggggctgcatggcatggtggtaaggggatggcattggtgaaagaagggtcaaagggaagcaatgcttgggaccccacatgtgggcctgtgtatctgtcttcccacatacatgttggtacatgaatgtgcatgtgtgctcctggcaggtatacagctctggcccaagctctggtcctgggggcccggggtaccccccgagaccgtggctggcgtctccccaacaacaagctgggttccggggatgacatctctgtcttcgtcatccccctgggagggccaggcagttactcctgaggggctgaacaccatccctcccactagcctctccatacttactcctctcacagcccaaattctgaagttgtctccctgacccttctttagtggcaacttaactgaagaagggatgtccgctatatccaaaattacagctattggcaaataaacgagatggataaaggtg

SEQ ID NO: 2 - DNA, 2852 bp, Homo sapiens
ggtggcccagagcaagggcaagtttcgcccgggacccgcccagctggccgggagccagtagcagggaagggccggctggcgcgagcaccgcccacgcggagccatgggggcggggcctgggcgggggcggggccgcggccgagggcggggcagggaggcagcatgctaaaccgggtgcgctcggccgtggcgcacctggtgagctccgggggcgctccgcctccgcgccccaaatccccggacctgcccaacgccgcctcggcgccgcccgccgccgctccagaagcgcccaggagccctcccgcgaaggctgggagcgggagcgcgacgcccgcgaaggctgttgaggctcgagcgagcttctccagaccgacctttctgcagctgagccccggggggctgcgacgcgccgatgaccacgcgggccgggctgtgcaaagccccccggacacgggccgccgcctgccctggagcacaggctacgccgagtgagcgccccctggggcacccaaaccaggatggggctcccacccctctccccagctccgcatccccggcgctaggacgcgttccccacgccgcgtccgggccaggagctcccttttccgtggacctttgctatcctctggtcttcgggccgcaccccctcccaacccattttccagtggggggcagcctgtgtcaccttcttcacgtccttcccgctcattgactgccctcgcccacgccgcctcaggaccctgttctgccccagagcccggagggcggagagcccggcgaaggatgagttggccagttccccgtcgcggcccggcagcttaaaggctaagggaaaaggggtttcacgaaggagcggggttctttttaataggggacatagcggttgggaagactcgctcacccgcttcccggctccagcgccccagttccctgtccctcttaccgtagttcccctccccctccacacccagaaatagcccgcgacaccaggaggccgccagcttccccaggagcggggagggggacgcccggggtagaggagggtcccatttagatgcccttcagcctgccaactcgtgctggcctggcaaagaagcggaccccctgcccggagcggccggctggcccccgggctgtgtgtattttaaatgcatctgccgggaacgcagagcaccgagggagatgggggcgctcagttcgctgaggaaggtggctggtggcccatggacccaccaccacctcccttagcctcctgtgtgggaggagtttatgggtatgtggctcctgcccagtccaggtgggctttcacttctactctatttcagttcctctttcccgatctgggctggagagcttcctcattgttaaggcagcagaaactttcgctggatggttttaggataaggggtcatcaatgctggcaagagtcggcacaatgaggaccaggcttgctgtgaagtggtgtatgtggaaggtcggaggagtgttacaggagtacctagggagcctagccgaggccagggactctgcttctactactggggcctatttgatgggcatgcagggggcggagctgctgaaatggcctcacggctcctgcatcgccatatccgagagcagctaaaggacctggtagagatacttcaggacccttcgccaccacccctctgcctcccaaccactccggggaccccagattcctccgatccctctcacttgcttggccctcagtcctgctggtcttcacagaaggaagtgagccacgagagcctggtagtgggggccattgagaatgccttccagctcatggatgagcagatggcccgggagcggcgtggccaccaagtggaggggggctgctgtgcactggttgtgatctacctgctaggcaaggtgtacgtggccaatgcaggcgatagcagggccatcattgtccggaatggtgaaatcattccaatgtcccgggagtttaccccggagactgagcgccagcgtcttcagctgcttggcttcctgaaaccagagctgctaggcagtgaattcacccaccttgagttcccccgcagagttctgcccaaggagctggggcagaggatgttgtaccgggaccagaacatgaccggctggctcgggtgatggccaccattggggtgacccgaggcttgggagaccacagccttaaggtctgcagttccaccctgcccatcaagccctttctctcctgcttccctgaggtacgagtgtatgacctgacacaatatgagcactgcccagatgatgtgctagtcctgggaacagatggcctgtgggatgtcactactgactgtgaggtagctgccactgtggacagggtgctgtcggcctatgagcctaatgaccacagcaggtaggggctgcatggcatggtggtaaggggatggcattggtgaaagaagggtcaaagggaagcaatgcttgggaccccacatgtgggcctgtgtatctgtcttcccacatacatgttggtacatgaatgtgcatgtgtgctcctggcaggtatacagctctggcccaagctctggtcctgggggcccggggtaccccccgagaccgtggctggcgtctccccaacaacaagctgggttccggggatgacatctctgtcttcgtcatccccctgggagggccaggcagttactcctgaggggctgaacaccatccctcccactagcctctccatacttactcctctcacagcccaaattctgaagttgtctccctgacccttctttagtggcaacttaactgaagaagggatgtccgctatatccaaaattacagctattggcaaataaacgagatggataaaggtg

SEQ ID NO: 3 - DNA, 1934 bp, Homo sapiens
ggtggcccagagcaagggcaagtttcgcccgggacccgcccagctggccgggagccagtagcagggaagggccggctggcgcgagcaccgcccacgcggagccatgggggcggggcctgggcgggggcggggccgcggccgagggcggggcagggaggcagcatgctaaaccgggtgcgctcggccgtggcgcacctggtgagctccgggggcgctccgcctccgcgccccaaatccccggacctgcccaacgccgcctcggcgccgcccgccgccgctccagaagcgcccaggagccctcccgcgaaggctgggagcgggagcgcgacgcccgcgaaggctgttgaggctcgagcgagcttctccagaccgacctttctgcagctgagccccggggggctgcgacgcgccgatgaccacgcgggccgggctgtgcaaagccccccggacacgggccgccgcctgccctggagcacaggctacgccgaggtcatcaatgctggcaagagtcggcacaatgaggaccaggcttgctgtgaagtggtgtatgtggaaggtcggaggagtgttacaggagtacctagggagcctagccgaggccagggactctgcttctactactggggcctatttgatgggcatgcagggggcggagctgctgaaatggcctcacggctcctgcatcgccatatccgagagcagctaaaggacctggtagagatacttcaggacccttcgccaccacccctctgcctcccaaccactccggggaccccagattcctccgatccctctcacttgcttggccctcagtcctgctggtcttcacagaaggaagtgagccacgagagcctggtagtgggggccattgagaatgccttccagctcatggatgagcagatggcccgggagcggcgtggccaccaagtggaggggggctgctgtgcactggttgtgatctacctgctaggcaaggtgtacgtggccaatgcaggcgatagcagggccatcattgtccggaatggtgaaatcattccaatgtcccgggagtttaccccggagactgagcgccagcgtcttcagctgcttggcttcctgaaaccagagctgctaggcagtgaattcacccaccttgagttcccccgcagagttctgcccaaggagctggggcagaggatgttgtaccgggaccagaacatgaccggctggctcgggtgatggccaccattggggtgacccgaggcttgggagaccacagccttaaggtctgcagttccaccctgcccatcaagccctttctctcctgcttccctgaggtacgagtgtatgacctgacacaatatgagcactgcccagatgatgtgctagtcctgggaacagatggcctgtgggatgtcactactgactgtgaggtagctgccactgtggacagggtgctgtcggcctatgagcctaatgaccacagcaggtaggggctgcatggcatggtggtaaggggatggcattggtgaaagaagggtcaaagggaagcaatgcttgggaccccacatgtgggcctgtgtatctgtcttcccacatacatgttggtacatgaatgtgcatgtgtgctcctggcaggtatacagctctggcccaagctctggtcctgggggcccggggtaccccccgagaccgtggctggcgtctccccaacaacaagctgggttccggggatgacatctctgtcttcgtcatccccctgggagggccaggcagttactcctgaggggctgaacaccatccctcccactagcctctccatacttactcctctcacagcccaaattctgaagttgtctccctgacccttctttagtggcaacttaactgaagaagggatgtccgctatatccaaaattacagctattggcaaataaacgagatggataaaggtg

SEQ ID NO: 4 - DNA, 243 bp, Homo sapiens
ggtggcccagagcaagggcaagtttcgcccgggacccgcccagctggccgggagccagtagcagggaagggccggctggcgcgagcaccgcccacgcggagccatgggggcggggcctgggcgggggcggggccgcggccgagggcggggcagggaggcagcatgctaaaccgggtgcgctcggccgtggcgcacctggtgagctccgggggcgctccgcctccgcgccccaaatccccggac

SEQ ID NO: 5 - DNA, 207 bp, Homo sapiens
ctgcccaacgccgcctcggcgccgcccgccgccgctccagaagcgcccaggagccctcccgcgaaggctgggagcgggagcgcgacgcccgcgaaggctgttgaggctcgagcgagcttctccagaccgacctttctgcagctgagccccggggggctgcgacgcgccgatgaccacgcgggccgggctgtgcaaagccccccggac

SEQ ID NO: 6 - DNA, 248 bp, Homo sapiens
gtgagcgccccctggggcacccaaaccaggatggggctcccacccctctccccagctccgcatccccggcgctaggacgcgttccccacgccgcgtccgggccaggagctcccttttccgtggacctttgctatcctctggtcttcgggccgcaccccctcccaacccattttccagtggggggcagcctgtgtcaccttcttcacgtccttcccgctcattgactgccctcgcccacgccgcctcag

SEQ ID NO: 7 - DNA, 324 bp, Homo sapiens
ggaaaaggggtttcacgaaggagcggggttctttttaataggggacatagcggttgggaagactcgctcacccgcttcccggctccagcgccccagttccctgtccctcttaccgtagttcccctccccctccacacccagaaatagcccgcgacaccaggaggccgccagcttccccaggagcggggagggggacgcccggggtagaggagggtcccatttagatgcccttcagcctgccaactcgtgctggcctggcaaagaagcggaccccctgcccggagcggccggctggcccccgggctgtgtgtattttaaatgcat

SEQ ID NO: 8 - DNA, 252 bp, Homo sapiens
ctgccgggaacgcagagcaccgagggagatgggggcgctcagttcgctgaggaaggtggctggtggcccatggacccaccaccacctcccttagcctcctgtgtgggaggagtttatgggtatgtggctcctgcccagtccaggtgggctttcacttctactctatttcagttcctctttcccgatctgggctggagagcttcctcattgttaaggcagcagaaactttcgctggatggttttaggataagg

SEQ ID NO: 9 - DNA, 142 bp, Homo sapiens
gtaggggctgcatggcatggtggtaaggggatggcattggtgaaagaagggtcaaagggaagcaatgcttgggaccccacatgtgggcctgtgtatctgtcttcccacatacatgttggtacatgaatgtgcatgtgtgctc

SEQ ID NO: 10 - DNA, 238 bp, Homo sapiens
gtatacagctctggcccaagctctggtcctgggggcccggggtaccccccgagaccgtggctggcgtctccccaacaacaagctgggttccggggatgacatctctgtcttcgtcatccccctgggagggccaggcagttactcctgaggggctgaacaccatccctcccactagcctctccatacttactcctctcacagcccaaattctgaagttgtctccctgacccttctttag

SEQ ID NO: 11 - DNA, 38 bp, Homo sapiens
acgggccgccgcctgccctggagcacaggctacgccga

SEQ ID NO: 12 - DNA, 94 bp, Homo sapiens
gaccctgttctgccccagagcccggagggcggagagcccggcgaaggatgagttggccagttccccgtcgcggcccggcagcttaaaggctaag

SEQ ID NO: 13 - DNA, 115 bp, Homo sapiens
ggtcatcaatgctggcaagagtcggcacaatgaggaccaggcttgctgtgaagtggtgtatgtggaaggtcggaggagtgttacaggagtacctagggagcctagccgaggccag

SEQ ID NO: 14 - DNA, 111 bp, Homo sapiens
ggactctgcttctactactggggcctatttgatgggcatgcagggggcggagctgctgaaatggcctcacggctcctgcatcgccatatccgagagcagctaaaggacctg

SEQ ID NO: 15 - DNA, 117 bp, Homo sapiens
gtagagatacttcaggacccttcgccaccacccctctgcctcccaaccactccggggaccccagattcctccgatccctctcacttgcttggccctcagtcctgctggtcttcacag

SEQ ID NO: 16 - DNA, 6 bp, Homo sapiens
aaggaa

SEQ ID NO: 17 - DNA, 54 bp, Homo sapiens
gtgagccacgagagcctggtagtgggggccattgagaatgccttccagctcatg

SEQ ID NO: 18 - DNA, 86 bp, Homo sapiens
gatgagcagatggcccgggagcggcgtggccaccaagtggaggggggctgctgtgcactggttgtgatctacctgctaggcaaggt

SEQ ID NO: 19 - DNA, 27 bp, Homo sapiens
gtacgtggccaatgcaggcgatagcag

SEQ ID NO: 20 - DNA, 85 bp, Homo sapiens
ggccatcattgtccggaatggtgaaatcattccaatgtcccgggagtttaccccggagactgagcgccagcgtcttcagctgctt

SEQ ID NO: 21 - DNA, 119 bp, Homo sapiens
ggcttcctgaaaccagagctgctaggcagtgaattcacccaccttgagttcccccgcagagttctgcccaaggagctggggcagaggatgttgtaccgggaccagaacatgaccggctg

SEQ ID NO: 22 - DNA, 64 bp, Homo sapiens
ggcctacaaaaagatcgagctggaggatctcaggtttcctctggtctgtggggagggcaaaaag

SEQ ID NO: 23 - DNA, 108 bp, Homo sapiens
gctcgggtgatggccaccattggggtgacccgaggcttgggagaccacagccttaaggtctgcagttccaccctgcccatcaagccctttctctcctgcttccctgag

SEQ ID NO: 24 - DNA, 15 bp, Homo sapiens
gtacgagtgtatgac

SEQ ID NO: 25 - DNA, 81 bp, Homo sapiens
ctgacacaatatgagcactgcccagatgatgtgctagtcctgggaacagatggcctgtgggatgtcactactgactgtgag

SEQ ID NO: 26 - DNA, 56 bp, Homo sapiens
gtagctgccactgtggacagggtgctgtcggcctatgagcctaatgaccacagcag

SEQ ID NO: 27 - DNA, 7 bp, Homo sapiens
ctggcag

SEQ ID NO: 28 - DNA, 79 bp, Homo sapiens
tggcaacttaactgaagaagggatgtccgctatatccaaaattacagctattggcaaataaacgagatggataaaggtg

SEQ ID NO: 29 - protein, 505 aa, Homo sapiens [sequence omitted]

SEQ ID NO: 30 - protein, 488 aa, Homo sapiens
APPPRPKSPDLPNAASAPPAAAPEAPRSPPAKAGSGSATPAKAVEARASFSRPTFLQLSPGGLRRADDHAGRAVQSPPDTGRRLPWSTGYAEVINAGKSRHNEDQACCEVVYVEGRRSVTGVPREPSRGQGLCFYYWGLFDGHAGGGAAEMASRLLHRHIREQLKDLVEILQDPSPPPLCLPTTPGTPDSSDPSHLLGPQSCWSSQKEVSHESLVVGAIENAFQLMDEQMARERRGHQVEGGCCALVVIYLLGKVYVANAGDSRAIIVRNGEIIPMSREFTPETERQRLQLLGFLKPELLGSEFTHLEFPRRVLPKELGQRMLYRDQNMTGWAYKKIELEDLRFPLVCGEGKKARVMATIGVTRGLGDHSLKVCSSTLPIKPFLSCFPEVRVYDLTQYEHCPDDVLVLGTDGLWDVTTDCEVAATVDRVLSAYEPNDHSRYTALAQALVLGARGTPRDRGWRLPNNKLGSGDDISVFVIPLGGPGSYS

SEQ ID NO: 31 - protein, 299 aa, Homo sapiens
MASRLLHRHIREQLKDLKEVSHESLVVGAIENAFQLMDEQMARERRGHQVEGGCCALVVIYLLGKVYVANAGDSRAIIVRNGEIIPMSREFTPETERQRLQLLGFLKPELLGSEFTHLEFPRRVLPKELGQRMLYRDQNMTGWAYKKIELEDLRFPLVCGEGKKARVMATIGVTRGLGDHSLKVCSSTLPIKPFLSCFPEVRVYDLTQYEHCPDDVLVLGTDGLWDVTTDCEVAATVDRVLSAYEPNDHSRYTALAQALVLGARGTPRDRGWRLPNNKLGSGDDISVFVIPLGGPGSYS

SEQ ID NO: 32 - protein, 299 aa, Homo sapiens; identical to SEQ ID NO: 31

SEQ ID NO: 33 - protein, 290 aa, Homo sapiens [sequence omitted]

SEQ ID NO: 34 - protein, 457 aa, Homo sapiens
MLNRVRSAVAHLVSSGGAPPPRPKSPDLPNAASAPPAAAPEAPRSPPAKAGSGSATPAKAVEARASFSRPTFLQLSPGGLRRADDHAGRAVQSPPDTGRRLPWSTGYAEVINAGKSRHNEDQACCEVVYVEGRRSVTGVPREPSRGQGLCFYYWGLFDGHAGGGAAEMASRLLHRHIREQLKDLVEILQDPSPPPLCLPTTPGTPDSSDPSHLLGPQSCWSSQKEVSHESLVVGAIENAFQLMDEQMARERRGHQVEGGCCALVVIYLLGKVYVANAGDSRAIIVRNGEIIPMSREFTPETERQRLQLLGFLKPELLGSEFTHLEFPRRVLPKELGQRMLYRDQNMTGWAYKKIELEDLRFPLVCGEGKKARVMATIGVTRGLGDHSLKVCSSTLPIKPFLSCFPEVRVYDLTQYEHCPDDVLVLGTDGLWDVTTDCEVAATVDRVLSAYEPNDHSR

SEQ ID NO: 35 - protein, 184 aa, Homo sapiens [sequence omitted]

SEQ ID NO: 36 - protein, 351 aa, Homo sapiens
MLNRVRSAVAHLVSSGGAPPPRPKSPDLPNAASAPPAAAPEAPRSPPAKAGSGSATPAKAVEARASFSRPTFLQLSPGGLRRADDHAGRAVQSPPDTGRRLPWSTGYAEVINAGKSRHNEDQACCEVVYVEGRRSVTGVPREPSRGQGLCFYYWGLFDGHAGGGAAEMASRLLHRHIREQLKDLVEILQDPSPPPLCLPTTPGTPDSSDPSHLLGPQSCWSSQKEVSHESLVVGAIENAFQLMDEQMARERRGHQVEGGCCALVVIYLLGKVYVANAGDSRAIIVRNGEIIPMSREFTPETERQRLQLLGFLKPELLGSEFTHLEFPRRVLPKELGQRMLYRDQNMTGWLG

SEQ ID NO: 37 - DNA, 2519 bp, Homo sapiens
taccttggctatccccctctgagttcttgccttgattctcctgttactgtcccgcgaacccacatccctacaaagcaggaaagtatgcttgggagaggccaagtgagtggggaatcagcccaaagccaggcgtccagggtctccctcacctgaagctgactttttccccaccttggacagagggcgggagatgccatccccactgaacccagtgctttcaccagccatattagctcccactcaccccccgtcgtggaagcctcggccgtcacacctgcagggccggggcgtgcatggcctcagggatggcctgttcagctgctgggtgactcgggtccaggtgcctcaccacctgctgagctctgtgtgatttctggacacttctgctcgttgcctttgggctcagtgaagagtctggagtttatctggagtgaggtggccggttcttggtgggatctgagcagagtccattcaggagcaggaaagttcatctcagaccctaaatccagccacgtcatgccacgcttaacacctctaacaacttcccctggcacttaggacagcgtctggctccttccctcggctcatggccctcagaatctgcgtcacatacaccccagctctcccgataggtctctgcactcgctgttgcctctgcctggaacagtctccctcctggtgtcattgtctccgtggtgtgtccttcctgaccttccacctccaccaggtgccgacacttccctgaccccagtaacctcttctcttgggtgggtgaatgccacctgctgatgtctgatttattcatcggttttcttgtctgtagtctgtcccccttggggacagggactcgttgctcatgttcacccggcaggctggacacttcgtggagggctccaaagccggcagatcccggggccgcctctgtctctcccaggccctgcgtgttgcggtgagaggagcatttgtgtctctgtggtttgctgctggagctggtgaccgggagagaaacaagggagacaagggtgcccagacaggtgcggggctcagccaggaggcagaagacgtggacgtgtcccgggccaggagggtcacagatgcaccacaaggcactctgtgtggcactgggaacaggaattctgggagtcagtctgcaagggtggtgggcgttgctcacctgggagaagcctttagagtgggcgttgagcaggccattagctcgtgccctgaggaggtgcatgggcggcatgggctctccatggaaattatgtgggcgcgaatggatgtggctctgcgctcacctgggcgaggacttctggccggtgccggggcactctgcatgaccctggcagaatcgagctgccctgactatgaaaggggaagaagagcatgcctgaccctccaccggcaccccacccctcactgctccacctggggcctgcctctgcgggtggctgggtcctggctgactgttgtgactgttgaggccctgggggggtggcgcatgggagttaggaggactggccaggtggggcccactatgcacccacccccagtgtcaggtgcttctcctctcctcctccaccacctcctcctcctcctcctcatcatcatcctcacttgttgaggacgtcctgtgtgccaagtggtttatatgcccagcctcatttaatcctcagaatgactccatgaggtagctactaaaaccccccacttaacagatgaggaaactgaggcctagagaagctcaacaagttgcctaagttccaagtttcctctcccaactctcctaccctctcctcttccttctcctttctcccattcttccctgcctcttccctaactagacaattttttattgagtgtctcccaggtgcaggcatgagccaggtgctgggaaaatcatgataacccagctccttctggtcattttctcagctggttagaggctgggaggacacgcaagttcagctccagccgactggggcattggtggtagcccctggagacattgtgcaatggggctacgaggctgcatctggctccagggaagcgtgttgcaatccatgagtgatgtctgccatgcgtacaggcatggagagtgaggcgcctgtactgtctttctgtagaccctagactggtggggcctctgaaatgcatccagacactgtgctgggtgtgttgcatggccctcccaaccaattcagtatttttctccccattttccagggagaaatctaaggcgtcagaatgtaaggttcttattggaacccaggctccagggtccctggttttctgtgacatcatgctgcaggaccctgtttctctctttgctttggctgctggggagctcagaagggagctttaggcttgctctcagtcaccacattagctcaggggtttgggcatttttgtcgccgtctcctttgggctctgtctcctccctgctgtgcttcctgaggagcaggccggatgtaagttatcaactataaataaaaccaagacttccgttctggctctca

SEQ ID NO: 38 - DNA, 2423 bp, Homo sapiens
taccttggctatccccctctgagttcttgccttgattctcctgttactgtcccgcgaacccacatccctacaaagcaggaaagtatgcttgggagaggccaagtgagtggggaatcagcccaaagccaggcgtccagggtctccctcacctgaagctgactttttccccaccttggacagagggcgggagatgccatccccactgaacccagtgctttcaccagccatattagctcccactcaccccccgtcgtggaagcctcggccgtcacacctgcagggccggggcgtgcatggcctcagggatggcctgttcagctgctgggtgactcgggtccaggtgcctcaccacctgctgagctctgtgtgatttctggacacttctgctcgttgcctttgggctcagtgaagagtctggagtttatctggagtgaggtggccggttcttggtgggatctgagcagagtccattcaggagcaggaaagttcatctcagaccctaaatccagccacgtcatgccacgcttaacacctctaacaacttcccctggcacttaggacagcgtctggctccttccctcggctcatggccctcagaatctgcgtcacatacaccccagctctcccgataggtctctgcactcgctgttgcctctgcctggaacagtctccctcctggtgtcattgtctccgtggtgtgtccttcctgaccttccacctccaccagtctgtcccccttggggacagggactcgttgctcatgttcacccggcaggctggacacttcgtggagggctccaaagccggcagatcccggggccgcctctgtctctcccaggccctgcgtgttgcggtgagaggagcatttgtgtctctgtggtttgctgctggagctggtgaccgggagagaaacaagggagacaagggtgcccagacaggtgcggggctcagccaggaggcagaagacgtggacgtgtcccgggccaggagggtcacagatgcaccacaaggcactctgtgtggcactgggaacaggaattctgggagtcagtctgcaagggtggtgggcgttgctcacctgggagaagcctttagagtgggcgttgagcaggccattagctcgtgccctgaggaggtgcatgggcggcatgggctctccatggaaattatgtgggcgcgaatggatgtggctctgcgctcacctgggcgaggacttctggccggtgccggggcactctgcatgaccctggcagaatcgagctgccctgactatgaaaggggaagaagagcatgcctgaccctccaccggcaccccacccctcactgctccacctggggcctgcctctgcgggtggctgggtcctggctgactgttgtgactgttgaggccctgggggggtggcgcatgggagttaggaggactggccaggtggggcccactatgcacccacccccagtgtcaggtgcttctcctctcctcctccaccacctcctcctcctcctcctcatcatcatcctcacttgttgaggacgtcctgtgtgccaagtggtttatatgcccagcctcatttaatcctcagaatgactccatgaggtagctactaaaaccccccacttaacagatgaggaaactgaggcctagagaagctcaacaagttgcctaagttccaagtttcctctcccaactctcctaccctctcctcttccttctcctttctcccattcttccctgcctcttccctaactagacaattttttattgagtgtctcccaggtgcaggcatgagccaggtgctgggaaaatcatgataacccagctccttctggtcattttctcagctggttagaggctgggaggacacgcaagttcagctccagccgactggggcattggtggtagcccctggagacattgtgcaatggggctacgaggctgcatctggctccagggaagcgtgttgcaatccatgagtgatgtctgccatgcgtacaggcatggagagtgaggcgcctgtactgtctttctgtagaccctagactggtggggcctctgaaatgcatccagacactgtgctgggtgtgttgcatggccctcccaaccaattcagtatttttctccccattttccagggagaaatctaaggcgtcagaatgtaaggttcttattggaacccaggctccagggtccctggttttctgtgacatcatgctgcaggaccctgtttctctctttgctttggctgctggggagctcagaagggagctttaggcttgctctcagtcaccacattagctcaggggtttgggcatttttgtcgccgtctcctttgggctctgtctcctccctgctgtgcttcctgaggagcaggccggatgtaagttatcaactataaataaaaccaagacttccgttctggctctca

SEQ ID NO: 39 - DNA, 2329 bp, Homo sapiens
taccttggctatccccctctgagttcttgccttgattctcctgttactgtcccgcgaacccacatccctacaaagcaggaaagtatgcttgggagaggccaagtgagtggggaatcagcccaaagccaggcgtccagggtctccctcacctgaagctgactttttccccaccttggacagagggcgggagatgccatccccactgaacccagtgctttcaccagccatattagctcccactcaccccccgtcgtggaagcctcggccgtcacacctgcagggccggggcgtgcatggcctcagggatggcctgttcagctgctgggtgactcgggtccaggtgcctcaccacctgctgagctctgtgtgatttctggacacttctgctcgttgcctttgggctcagtgaagagtctggagtttatctggagtgaggtggccggttcttggtgggatctgagcaggacagcgtctggctccttccctcggctcatggccctcagaatctgcgtcacatacaccccagctctcccgataggtctctgcactcgctgttgcctctgcctggaacagtctccctcctggtgtcattgtctccgtggtgtgtccttcctgaccttccacctccaccagtctgtcccccttggggacagggactcgttgctcatgttcacccggcaggctggacacttcgtggagggctccaaagccggcagatcccggggccgcctctgtctctcccaggccctgcgtgttgcggtgagaggagcatttgtgtctctgtggtttgctgctggagctggtgaccgggagagaaacaagggagacaagggtgcccagacaggtgcggggctcagccaggaggcagaagacgtggacgtgtcccgggccaggagggtcacagatgcaccacaaggcactctgtgtggcactgggaacaggaattctgggagtcagtctgcaagggtggtgggcgttgctcacctgggagaagcctttagagtgggcgttgagcaggccattagctcgtgccctgaggaggtgcatgggcggcatgggctctccatggaaattatgtgggcgcgaatggatgtggctctgcgctcacctgggcgaggacttctggccggtgccggggcactctgcatgaccctggcagaatcgagctgccctgactatgaaaggggaagaagagcatgcctgaccctccaccggcaccccacccctcactgctccacctggggcctgcctctgcgggtggctgggtcctggctgactgttgtgactgttgaggccctgggggggtggcgcatgggagttaggaggactggccaggtggggcccactatgcacccacccccagtgtcaggtgcttctcctctcctcctccaccacctcctcctcctcctcctcatcatcatcctcacttgttgaggacgtcctgtgtgccaagtggtttatatgcccagcctcatttaatcctcagaatgactccatgaggtagctactaaaaccccccacttaacagatgaggaaactgaggcctagagaagctcaacaagttgcctaagttccaagtttcctctcccaactctcctaccctctcctcttccttctcctttctcccattcttccctgcctcttccctaactagacaattttttattgagtgtctcccaggtgcaggcatgagccaggtgctgggaaaatcatgataacccagctccttctggtcattttctcagctggttagaggctgggaggacacgcaagttcagctccagccgactggggcattggtggtagcccctggagacattgtgcaatggggctacgaggctgcatctggctccagggaagcgtgttgcaatccatgagtgatgtctgccatgcgtacaggcatggagagtgaggcgcctgtactgtctttctgtagaccctagactggtggggcctctgaaatgcatccagacactgtgctgggtgtgttgcatggccctcccaaccaattcagtatttttctccccattttccagggagaaatctaaggcgtcagaatgtaaggttcttattggaacccaggctccagggtccctggttttctgtgacatcatgctgcaggaccctgtttctctctttgctttggctgctggggagctcagaagggagctttaggcttgctctcagtcaccacattagctcaggggtttgggcatttttgtcgccgtctcctttgggctctgtctcctccctgctgtgcttcctgaggagcaggccggatgtaagttatcaactataaataaaaccaagacttccgttctggctctca

SEQ ID NO: 40 - DNA, 2351 bp, Homo sapiens
taccttggctatccccctctgagttcttgccttgattctcctgttactgtcccgcgaacccacatccctacaaagcaggaaagtatgcttgggagaggccaagtgagtggggaatcagcccaaagccaggcgtccagggtctccctcacctgaagctgactttttccccaccttggacagagggcgggagatgccatccccactgaacccagtgctttcaccagccatattagctcccactcaccccccgtcgtggaagcctcggccgtcacacctgcagggccggggcgtgcatggcctcagggatggcctgttcagctgctgggtgactcgggtccaggtgcctcaccacctgctgagctctgtgtgatttctggacacttctgctcgttgcctttgggctcagtgaagagtctggagtttatctggagtgaggtggccggttcttggtgggatctgagcaggtctctgcactcgctgttgcctctgcctggaacagtctccctcctggtgtcattgtctccgtggtgtgtccttcctgaccttccacctccaccaggtgccgacacttccctgaccccagtaacctcttctcttgggtgggtgaatgccacctgctgatgtctgatttattcatcggttttcttgtctgtagtctgtcccccttggggacagggactcgttgctcatgttcacccggcaggctggacacttcgtggagggctccaaagccggcagatcccggggccgcctctgtctctcccaggccctgcgtgttgcggtgagaggagcatttgtgtctctgtggtttgctgctggagctggtgaccgggagagaaacaagggagacaagggtgcccagacaggtgcggggctcagccaggaggcagaagacgtggacgtgtcccgggccaggagggtcacagatgcaccacaaggcactctgtgtggcactgggaacaggaattctgggagtcagtctgcaagggtggtgggcgttgctcacctgggagaagcctttagagtgggcgttgagcaggccattagctcgtgccctgaggaggtgcatgggcggcatgggctctccatggaaattatgtgggcgcgaatggatgtggctctgcgctcacctgggcgaggacttctggccggtgccggggcactctgcatgaccctggcagaatcgagctgccctgactatgaaaggggaagaagagcatgcctgaccctccaccggcaccccacccctcactgctccacctggggcctgcctctgcgggtggctgggtcctggctgactgttgtgactgttgaggccctgggggggtggcgcatgggagttaggaggactggccaggtggggcccactatgcacccacccccagtgtcaggtgcttctcctctcctcctccaccacctcctcctcctcctcctcatcatcatcctcacttgttgaggacgtcctgtgtgccaagtggtttatatgcccagcctcatttaatcctcagaatgactccatgaggtagctactaaaaccccccacttaacagatgaggaaactgaggcctagagaagctcaacaagttgcctaagttccaagtttcctctcccaactctcctaccctctcctcttccttctcctttctcccattcttccctgcctcttccctaactagacaattttttattgagtgtctcccaggtgcaggcatgagccaggtgctgggaaaatcatgataacccagctccttctggtcattttctcagctggttagaggctgggaggacacgcaagttcagctccagccgactggggcattggtggtagcccctggagacattgtgcaatggggctacgaggctgcatctggctccagggaagcgtgttgcaatccatgagtgatgtctgccatgcgtacaggcatggagagtgaggcgcctgtactgtctttctgtagaccctagactggtggggcctctgaaatgcatccagacactgtgctgggtgtgttgcatggccctcccaaccaattcagtatttttctccccattttccagggagaaatctaaggcgtcagaatgtaaggttcttattggaacccaggctccagggtccctggttttctgtgacatcatgctgcaggaccctgtttctctctttgctttggctgctggggagctcagaagggagctttaggcttgctctcagtcaccacattagctcaggggtttgggcatttttgtcgccgtctcctttgggctctgtctcctccctgctgtgcttcctgaggagcaggccggatgtaagttatcaactataaataaaaccaagacttccgttctggctctca

SEQ ID NO: 41 - DNA, 3175 bp, Homo sapiens
taccttggctatccccctctgagttcttgccttgattctcctgttactgtcccgcgaacccacatccctacaaagcaggaaagtatgcttgggagaggccaagtgagtggggaatcagcccaaagccaggcgtccagggtctccctcacctgaagctgactttttccccaccttggacagagggcgggagatgccatccccactgaacccagtgctttcaccagccatattagctcccactcaccccccgtcgtggaagcctcggccgtcacacctgcagggccggggcgtgcatggcctcagggatggcctgttcagctgctgggtgactcgggtccaggtgcctcaccacctgctgagctctgtgtgatttctggacacttctgctcgttgcctttgggctcagtgaagagtctggagtttatctggagtgaggtggccggttcttggtgggatctgagcaggtaagaagcagggtctttcttatgttttaaggaaagccctgtggctgctgggtgggggaccagctggaggggcaggagggcagcaggtgactcattacaaggctggggccatcatcctgtgagagctgggcatgaccagtgcaggtcagtggggttgagggtacagaccagtgggacccacagacggctcgggagtgaccaagcctctgctgagctgcccaggtcccctctggtggacacctcctacccggagccccccaaggtggtgccaaagctagaccaccatacagccagaggcctccaggccctacccacgacagcccagctggcttctgcccagccaccgtcacacacagagggcagccgtccccatggtccctagaggcggttgaggaccactgtgcctggagtcatctgtggctataaaccaggaggagaaggctgcccaccccctgccccagagatggggaggctggggccacccggtggatttgggcaggtcccagcttccaggatcatgaggtgaaaacgtgaagggaccctagaggccatggggacccaggcacagagcggcggcctctcatcctccccatggtcaaggaggtcagtgccttcccggggtggattacggatggtagtatcttccttctcctcagagtccattcaggagcaggaaagttcatctcagaccctaaatccagccacgtcatgccacgcttaacacctctaacaacttcccctggcacttaggacagcgtctggctccttccctcggctcatggccctcagaatctgcgtcacatacaccccagctctcccgataggtctctgcactcgctgttgcctctgcctggaacagtctccctcctggtgtcattgtctccgtggtgtgtccttcctgaccttccacctccaccaggtgccgacacttccctgaccccagtaacctcttctcttgggtgggtgaatgccacctgctgatgtctgatttattcatcggttttcttgtctgtagtctgtcccccttggggacagggactcgttgctcatgttcacccggcaggctggacacttcgtggagggctccaaagccggcagatcccggggccgcctctgtctctcccaggccctgcgtgttgcggtgagaggagcatttgtgtctctgtggtttgctgctggagctggtgaccgggagagaaacaagggagacaagggtgcccagacaggtgcggggctcagccaggaggcagaagacgtggacgtgtcccgggccaggagggtcacagatgcaccacaaggcactctgtgtggcactgggaacaggaattctgggagtcagtctgcaagggtggtgggcgttgctcacctgggagaagcctttagagtgggcgttgagcaggccattagctcgtgccctgaggaggtgcatgggcggcatgggctctccatggaaattatgtgggcgcgaatggatgtggctctgcgctcacctgggcgaggacttctggccggtgccggggcactctgcatgaccctggcagaatcgagctgccctgactatgaaaggggaagaagagcatgcctgaccctccaccggcaccccacccctcactgctccacctggggcctgcctctgcgggtggctgggtcctggctgactgttgtgactgttgaggccctgggggggtggcgcatgggagttaggaggactggccaggtggggcccactatgcacccacccccagtgtcaggtgcttctcctctcctcctccaccacctcctcctcctcctcctcatcatcatcctcacttgttgaggacgtcctgtgtgccaagtggtttatatgcccagcctcatttaatcctcagaatgactccatgaggtagctactaaaaccccccacttaacagatgaggaaactgaggcctagagaagctcaacaagttgcctaagttccaagtttcctctcccaactctcctaccctctcctcttccttctcctttctcccattcttccctgcctcttccctaactagacaattttttattgagtgtctcccaggtgcaggcatgagccaggtgctgggaaaatcatgataacccagctccttctggtcattttctcagctggttagaggctgggaggacacgcaagttcagctccagccgactggggcattggtggtagcccctggagacattgtgcaatggggctacgaggctgcatctggctccagggaagcgtgttgcaatccatgagtgatgtctgccatgcgtacaggcatggagagtgaggcgcctgtactgtctttctgtagaccctagactggtggggcctctgaaatgcatccagacactgtgctgggtgtgttgcatggccctcccaaccaattcagtatttttctccccattttccagggagaaatctaaggcgtcagaatgtaaggttcttattggaacccaggctccagggtccctggttttctgtgacatcatgctgcaggaccctgtttctctctttgctttggctgctggggagctcagaagggagctttaggcttgctctcagtcaccacattagctcaggggtttgggcatttttgtcgccgtctcctttgggctctgtctcctccctgctgtgcttcctgaggagcaggccggatgtaagttatcaactataaataaaaccaagacttccgttctggctctca

SEQ ID NO: 42 - DNA, 2425 bp, Homo sapiens
taccttggctatccccctctgagttcttgccttgattctcctgttactgtcccgcgaacccacatccctacaaagcaggaaagtatgcttgggagaggccaagtgagtggggaatcagcccaaagccaggcgtccagggtctccctcacctgaagctgactttttccccaccttggacagagggcgggagatgccatccccactgaacccagtgctttcaccagccatattagctcccactcaccccccgtcgtggaagcctcggccgtcacacctgcagggccggggcgtgcatggcctcagggatggcctgttcagctgctgggtgactcgggtccaggtgcctcaccacctgctgagctctgtgtgatttctggacacttctgctcgttgcctttgggctcagtgaagagtctggagtttatctggagtgaggtggccggttcttggtgggatctgagcaggacagcgtctggctccttccctcggctcatggccctcagaatctgcgtcacatacaccccagctctcccgataggtctctgcactcgctgttgcctctgcctggaacagtctccctcctggtgtcattgtctccgtggtgtgtccttcctgaccttccacctccaccaggtgccgacacttccctgaccccagtaacctcttctcttgggtgggtgaatgccacctgctgatgtctgatttattcatcggttttcttgtctgtagtctgtcccccttggggacagggactcgttgctcatgttcacccggcaggctggacacttcgtggagggctccaaagccggcagatcccggggccgcctctgtctctcccaggccctgcgtgttgcggtgagaggagcatttgtgtctctgtggtttgctgctggagctggtgaccgggagagaaacaagggagacaagggtgcccagacaggtgcggggctcagccaggaggcagaagacgtggacgtgtcccgggccaggagggtcacagatgcaccacaaggcactctgtgtggcactgggaacaggaattctgggagtcagtctgcaagggtggtgggcgttgctcacctgggagaagcctttagagtgggcgttgagcaggccattagctcgtgccctgaggaggtgcatgggcggcatgggctctccatggaaattatgtgggcgcgaatggatgtggctctgcgctcacctgggcgaggacttctggccggtgccggggcactctgcatgaccctggcagaatcgagctgccctgactatgaaaggggaagaagagcatgcctgaccctccaccggcaccccacccctcactgctccacctggggcctgcctctgcgggtggctgggtcctggctgactgttgtgactgttgaggccctgggggggtggcgcatgggagttaggaggactggccaggtggggcccactatgcacccacccccagtgtcaggtgcttctcctctcctcctccaccacctcctcctcctcctcctcatcatcatcctcacttgttgaggacgtcctgtgtgccaagtggtttatatgcccagcctcatttaatcctcagaatgactccatgaggtagctactaaaaccccccacttaacagatgaggaaactgaggcctagagaagctcaacaagttgcctaagttccaagtttcctctcccaactctcctaccctctcctcttccttctcctttctcccattcttccctgcctcttccctaactagacaattttttattgagtgtctcccaggtgcaggcatgagccaggtgctgggaaaatcatgataacccagctccttctggtcattttctcagctggttagaggctgggaggacacgcaagttcagctccagccgactggggcattggtggtagcccctggagacattgtgcaatggggctacgaggctgcatctggctccagggaagcgtgttgcaatccatgagtgatgtctgccatgcgtacaggcatggagagtgaggcgcctgtactgtctttctgtagaccctagactggtggggcctctgaaatgcatccagacactgtgctgggtgtgttgcatggccctcccaaccaattcagtatttttctccccattttccagggagaaatctaaggcgtcagaatgtaaggttcttattggaacccaggctccagggtccctggttttctgtgacatcatgctgcaggaccctgtttctctctttgctttggctgctggggagctcagaagggagctttaggcttgctctcagtcaccacattagctcaggggtttgggcatttttgtcgccgtctcctttgggctctgtctcctccctgctgtgcttcctgaggagcaggccggatgtaagttatcaactataaataaaaccaagacttccgttctggctctca

SEQ ID NO: 43 - DNA, 2589 bp, Homo sapiens
taccttggctatccccctctgagttcttgccttgattctcctgttactgtcccgcgaacccacatccctacaaagcaggaaagtatgcttgggagaggccaagtgagtggggaatcagcccaaagccaggcgtccagggtctccctcacctgaagctgactttttccccaccttggacagagggcgggagatgccatccccactgaacccagtgctttcaccagccatattagctcccactcaccccccgtcgtggaagcctcggccgtcacacctgcagggccggggcgtgcatggcctcagggatggcctgttcagctgctgggtgactcgggtccaggtgcctcaccacctgctgagctctgtgtgatttctggacacttctgctcgttgcctttgggctcagtgaagagtctggagtttatctggagtgaggtggccggttcttggtgggatctgagcagagtccattcaggagcaggaaagttcatctcagaccctaaatccagccacgtcatgccacgcttaacacctctaacaacttcccctggcacttaggacagcgtctggctccttccctcggctcatggccctcagaatctgcgtcacatacaccccagctctcccgataggtctctgcactcgctgttgcctctgcctggaacagtctccctcctggtgtcattgtctccgtggtgtgtccttcctgaccttccacctccaccagtctgtcccccttggggacagggactcgttgctcatgttcacccggcaggctggacacttcgtggagggctccaaagccggcagatcccggggccgcctctgtctctcccaggccctgcgtgttgcggtgagaggagcatttgtgtctctgtggtttgctgctggagctggtgaccgggagagaaacaagggagacaagggtgcccagacaggtgcggggctcagccaggaggcagaagacgtggacgtgtcccgggccaggagggtcacagatgcaccacaaggcactctgtgtggcactgggaacaggaattctgggagtcagtctgcaagggtggtgggcgttgctcacctgggagaagcctttagagtgggcgttgagcaggccattagctcgtgccctgaggaggtgcatgggcggcatgggctctccatggaaattatgtgggcgcgaatggatgtggctctgcgctcacctgggcgaggacttctggccggtgccggggcactctgcatgaccctggcagaatcgagctgccctgactatgaaaggggaagaagagcatgcctgaccctccaccggcaccccacccctcactgctccacctggggcctgcctctgcgggtggctgggtcctggctgactgttgtgactgttgaggccctgggggggtggcgcatgggagttaggaggactggccaggtggggcccactatgcacccacccccagtgtcaggtgcttctcctctcctcctccaccacctcctcctcctcctcctcatcatcatcctcacttgttgaggacgtcctgtgtgccaagtggtttatatgcccagcctcatttaatcctcagaatgactccatgaggtagctactaaaaccccccacttaacagatgaggaaactgaggcctagagaagctcaacaagttgcctaagttccaagtttcctctcccaactctcctaccctctcctcttccttctcctttctcccattcttccctgcctcttccctaactagacaattttttattgagtgtctcccaggtgcaggcatgagccaggtgctgggaaaatcatgataacccagctccttctggtcattttctcagctggttagaggctgggaggacacgcaagttcagctccagccgactggggcattggtggtagcccctggagacattgtgcaatggggctacgaggctgcatctggctccagggaagcgtgttgcaatccatgagtgatgtctgccatgcgtacaggcatggagagtgaggcgcctgtactgtctttctgtagaccctagactggtggggcctctgaaatgcatccagacactgtgctgggtgtgttgcatggccctcccaaccaattcagtatttttctccccattttccagggagaaatctaaggcgtcagaatgtaaggttcttattggaacccaggctccagggtccctggttttctgtgacatcatgctgcaggaccctgtttctctctttgctttggctgctggggagctcagaagggagctttaggcttgctctcagtcaccacattagctcaggggtttgggcatttttgtcgccgtctcctttgggctctgtctcctccctgctgtgcttcctgaggagcaggccggatgtaagttatcaactataaataaaaccaagacttccgttctggctctcactctagtttcctggtgcattttttttttttaaagttcttaatcaagggaggggatactcctaactgaagatgacatcagcatcagctggccccggggggcaggcccccagcccccaggcccgtgtgggccctgaatgcccccattatgaggggtaacctcattaca

SEQ ID NO: 44 - DNA, 2259 bp, Homo sapiens
taccttggctatccccctctgagttcttgccttgattctcctgttactgtcccgcgaacccacatccctacaaagcaggaaagtatgcttgggagaggccaagtgagtggggaatcagcccaaagccaggcgtccagggtctccctcacctgaagctgactttttccccaccttggacagagggcgggagatgccatccccactgaacccagtgctttcaccagccatattagctcccactcaccccccgtcgtggaagcctcggccgtcacacctgcagggccggggcgtgcatggcctcagggatggcctgttcagctgctgggtgactcgggtccaggtgcctcaccacctgctgagctctgtgtgatttctggacacttctgctcgttgcctttgggctcagtgaagagtctggagtttatctggagtgaggtggccggttcttggtgggatctgagcagagtccattcaggagcaggaaagttcatctcagaccctaaatccagccacgtcatgccacgcttaacacctctaacaacttcccctggcacttaggacagcgtctggctccttccctcggctcatggccctcagaatctgcgtcacatacaccccagctctcccgataggtctctgcactcgctgttgcctctgcctggaacagtctccctcctggtgtcattgtctccgtggtgtgtccttcctgaccttccacctccaccaggtgccgacacttccctgaccccagtaacctcttctcttgggtgggtgaatgccacctgctgatgtctgatttattcatcggttttcttgtctgtagtctgtcccccttggggacagggactcgttgctcatgttcacccggcaggaattctgggagtcagtctgcaagggtggtgggcgttgctcacctgggagaagcctttagagtgggcgttgagcaggccattagctcgtgccctgaggaggtgcatgggcggcatgggctctccatggaaattatgtgggcgcgaatggatgtggctctgcgctcacctgggcgaggacttctggccggtgccggggcactctgcatgaccctggcagaatcgagctgccctgactatgaaaggggaagaagagcatgcctgaccctccaccggcaccccacccctcactgctccacctggggcctgcctctgcgggtggctgggtcctggctgactgttgtgactgttgaggccctgggggggtggcgcatgggagttaggaggactggccaggtggggcccactatgcacccacccccagtgtcaggtgcttctcctctcctcctccaccacctcctcctcctcctcctcatcatcatcctcacttgttgaggacgtcctgtgtgccaagtggtttatatgcccagcctcatttaatcctcagaatgactccatgaggtagctactaaaaccccccacttaacagatgaggaaactgaggcctagagaagctcaacaagttgcctaagttccaagtttcctctcccaactctcctaccctctcctcttccttctcctttctcccattcttccctgcctcttccctaactagacaattttttattgagtgtctcccaggtgcaggcatgagccaggtgctgggaaaatcatgataacccagctccttctggtcattttctcagctggttagaggctgggaggacacgcaagttcagctccagccgactggggcattggtggtagcccctggagacattgtgcaatggggctacgaggctgcatctggctccagggaagcgtgttgcaatccatgagtgatgtctgccatgcgtacaggcatggagagtgaggcgcctgtactgtctttctgtagaccctagactggtggggcctctgaaatgcatccagacactgtgctgggtgtgttgcatggccctcccaaccaattcagtatttttctccccattttccagggagaaatctaaggcgtcagaatgtaaggttcttattggaacccaggctccagggtccctggttttctgtgacatcatgctgcaggaccctgtttctctctttgctttggctgctggggagctcagaagggagctttaggcttgctctcagtcaccacattagctcaggggtttgggcatttttgtcgccgtctcctttgggctctgtctcctccctgctgtgcttcctgaggagcaggccggatgtaagttatcaactataaataaaaccaagacttccgttctggctctca

SEQ ID NO: 45 - DNA, 2112 bp, Homo sapiens
taccttggctatccccctctgagttcttgccttgattctcctgttactgtcccgcgaacccacatccctacaaagcaggaaagtatgcttgggagaggccaagtgagtggggaatcagcccaaagccaggcgtccagggtctccctcacctgaagctgactttttccccaccttggacagagggcgggagatgccatccccactgaacccagtgctttcaccagccatattagctcccactcaccccccgtcgtggaagcctcggccgtcacacctgcagggccggggcgtgcatggcctcagggatggcctgttcagctgctgggtgactcgggtccaggtgcctcaccacctgctgagctctgtgtgatttctggacacttctgctcgttgcctttgggctcagtgaagagtctggagtttatctggagtgaggtggccggttcttggtgggatctgagcaggctggacacttcgtggagggctccaaagccggcagatcccggggccgcctctgtctctcccaggccctgcgtgttgcggtgagaggagcatttgtgtctctgtggtttgctgctggagctggtgaccgggagagaaacaagggagacaagggtgcccagacaggtgcggggctcagccaggaggcagaagacgtggacgtgtcccgggccaggagggtcacagatgcaccacaaggcactctgtgtggcactgggaacaggaattctgggagtcagtctgcaagggtggtgggcgttgctcacctgggagaagcctttagagtgggcgttgagcaggccattagctcgtgccctgaggaggtgcatgggcggcatgggctctccatggaaattatgtgggcgcgaatggatgtggctctgcgctcacctgggcgaggacttctggccggtgccggggcactctgcatgaccctggcagaatcgagctgccctgactatgaaaggggaagaagagcatgcctgaccctccaccggcaccccacccctcactgctccacctggggcctgcctctgcgggtggctgggtcctggctgactgttgtgactgttgaggccctgggggggtggcgcatgggagttaggaggactggccaggtggggcccactatgcacccacccccagtgtcaggtgcttctcctctcctcctccaccacctcctcctcctcctcctcatcatcatcctcacttgttgaggacgtcctgtgtgccaagtggtttatatgcccagcctcatttaatcctcagaatgactccatgaggtagctactaaaaccccccacttaacagatgaggaaactgaggcctagagaagctcaacaagttgcctaagttccaagtttcctctcccaactctcctaccctctcctcttccttctcctttctcccattcttccctgcctcttccctaactagacaattttttattgagtgtctcccaggtgcaggcatgagccaggtgctgggaaaatcatgataacccagctccttctggtcattttctcagctggttagaggctgggaggacacgcaagttcagctccagccgactggggcattggtggtagcccctggagacattgtgcaatggggctacgaggctgcatctggctccagggaagcgtgttgcaatccatgagtgatgtctgccatgcgtacaggcatggagagtgaggcgcctgtactgtctttctgtagaccctagactggtggggcctctgaaatgcatccagacactgtgctgggtgtgttgcatggccctcccaaccaattcagtatttttctccccattttccagggagaaatctaaggcgtcagaatgtaaggttcttattggaacccaggctccagggtccctggttttctgtgacatcatgctgcaggaccctgtttctctctttgctttggctgctggggagctcagaagggagctttaggcttgctctcagtcaccacattagctcaggggtttgggcatttttgtcgccgtctcctttgggctctgtctcctccctgctgtgcttcctgaggagcaggccggatgtaagttatcaactataaataaaaccaagacttccgttctggctctca

SEQ ID NO: 46 - DNA, 2401 bp, Homo sapiens
taccttggctatccccctctgagttcttgccttgattctcctgttactgtcccgcgaacccacatccctacaaagcaggaaagtatgcttgggagaggccaagtgagtggggaatcagcccaaagccaggcgtccagggtctccctcacctgaagctgactttttccccaccttggacagagggcgggagatgccatccccactgaacccagtgctttcaccagccatattagctcccactcaccccccgtcgtggaagcctcggccgtcacacctgcagggccggggcgtgcatggcctcagggatggcctgttcagctgctgggtgactcgggtccaggtgcctcaccacctgctgagctctgtgtgatttctggacacttctgctcgttgcctttgggctcagtgaagagtctggagtttatctggagtgaggtggccggttcttggtgggatctgagcagagtccattcaggagcaggaaagttcatctcagaccctaaatccagccacgtcatgccacgcttaacacctctaacaacttcccctggcacttaggacagcgtctggctccttccctcggctcatggccctcagaatctgcgtcacatacaccccagctctcccgataggtctctgcactcgctgttgcctctgcctggaacagtctccctcctggtgtcattgtctccgtggtgtgtccttcctgaccttccacctccaccagtctgtcccccttggggacagggactcgttgctcatgttcacccggcaggctggacacttcgtggagggctccaaagccggcagatcccggggccgcctctgtctctcccaggccctgcgtgttgcggtgagaggagcatttgtgtctctgtggtttgctgctggagctggtgaccgggagagaaacaagggagacaagggtgcccagacaggtgcggggctcagccaggaggcagaagacgtggacgtgtcccgggccaggagggtcacagatgcaccacaaggcactctgtgtggcactgggaacaggaattctgggagtcagtctgcaagggtggtgggcgttgctcacctgggagaagcctttagagtgggcgttgagcaggccattagctcgtgccctgaggaggtgcatgggcggcatgggctctccatggaaattatgtgggcgcgaatggatgtggctctgcgctcacctgggcgaggacttctggccggtgccggggcactctgcatgaccctggcagaatcgagctgccctgactatgaaaggggaagaagagcatgcctgaccctccaccggcaccccacccctcactgctccacctggggcctgcctctgcgggtggctgggtcctggctgactgttgtgactgttgaggccctgggggggtggcgcatgggagttaggaggactggccaggtggggcccactatgcacccacccccagtgtcaggtgcttctcctctcctcctccaccacctcctcctcctcctcctcatcatcatcctcacttgttgaggacgtcctgtgtgccaagtggtttatatgcccagcctcatttaatcctcagaatgactccatgaggtagctactaaaaccccccacttaacagatgaggaaactgaggcctagagaagctcaacaagttgcctaagttccaagtttcctctcccaactctcctaccctctcctcttccttctcctttctcccattcttccctgcctcttccctaactagacaattttttattgagtgtctcccaggtgcaggcatgagccaggtgctgggaaaatcatgataacccagctccttctggtcattttctcagctggttagaggctgggaggacacgcaagttcagctccagccgactggggcattggtggtagcccctggagacattgtgcaatggggctacgaggctgcatctggctccagggaagcgtgttgcaatccatgagtgatgtctgccatgcgtacaggcatggagagtgaggcgcctgtactgtctttctgtagaccctagactggtggggcctctgaaatgcatccagacactgtgctgggtgtgttgcatggccctcccaaccaattcagtatttttctccccattttccagggagaaatctaaggcgtcagaatgtaaggttcttattggaacccaggctccagggtccctggttttctgtgacatcatgctgcaggaccctgtttctctctttgctttggctgctggggagctcagaagggagctttaggcttgctctcagtcaccacattagtcgccgtctcctttgggctctgtctcctccctgctgtgcttcctgaggagcaggccggatgtaagttatcaactataaataaaaccaagacttccgttctggctctca

SEQ ID NO: 47 - DNA, 633 bp, Homo sapiens
taccttggctatccccctctgagttcttgccttgattctcctgttactgtcccgcgaacccacatccctacaaagcaggaaagtatgcttgggagaggccaagtgagtggggaatcagcccaaagccaggcgtccagggtctccctcacctgaagctgactttttccccaccttggacagagggcgggagatgccatccccactgaacccagtgctttcaccagccatattagctcccactcaccccccgtcgtggaagcctcggccgtcacacctgcagggccggggcgtgcatggcctcagggatggcctgttcagctgctgggtgactcgggtccaggtgcctcaccacctgctgagctctgtgtgatttctggacacttctgctcgttgcctttgggctcagtgaagagtctggagtttatctggagtgaggtggccggttcttggtgggatctgagcaggtggaggcaatgcccagagctgtggcagccaccttgcagccgtgaagcaccagtgggaatgacagtcaagagaaccacggagatgccagcccctggacccacagcagcagcacctgcttccagactcagagtgtgagaaaaaaataaactcctatttgtttatggcaag

SEQ ID NO: 48 - DNA, 1491 bp, Homo sapiens
taccttggctatccccctctgagttcttgccttgattctcctgttactgtcccgcgaacccacatccctacaaagcaggaaagtatgcttgggagaggccaagtgagtggggaatcagcccaaagccaggcgtccagggtctccctcacctgaagctgactttttccccaccttggacagagggcgggagatgccatccccactgaacccagtgctttcaccagccatattagctcccactcaccccccgtcgtggaagcctcggccgtcacacctgcagggccggggcgtgcatggcctcagggatggcctgttcagctgctgggtgactcgggtccaggtgcctcaccacctgctgagctctgtgtgatttctggacacttctgctcgttgcctttgggctcagtgaagagtctggagtttatctggagtgaggtggccggttcttggtgggatctgagcaggtggaggcaatgcccagagctgtggcagccaccttgcagccgtgaagcaccagtgggaatgacagtcaagagaaccacggagatgccagcccctggacccacagcagcagcacctgcttccagactcagagtgtgagaaaaaaataaactcctatttgtttatggcaagagacaaggtctagctctgtgatgcaggccggaggacagtggtgtgatcacagctcactgcagccttgaactcctgggttccagcaatcctcccacctcagcctccttagtaggcgtggctacagtaatggaagacagcaaaagaagtttggagattcctggtttaaagcatttaaagcctctgtgaaaatttgcccaggccaacaacttcactttccacactcagtgccacgaagtgcagctctaagctggggatttctgtgcagagatgatccactgagtgcaacccaccaccgtgcggacaccacccctgcagaatcatctgtgaaaacaaccccaggcccagacataggggccagctaagcttcgtagccctcgaaatacagggagtgccccctctggaccctcgagcccacagtccatccaccacagaggtgtctgctgctcatcagatagttcctaccaagaaaatgctgtgtgaacccatctgtgtggcaaaccggcacggggagaaagctgacttccaaggacgtctaccaactgtcacttgcaaaccagaacttgcctctttgtagatgaagactggcagggctgaagaaatgatctcatgttgaaattaatgatgagcttcagggtgaggtgactcagttcgaatgctgttgaatgttggtgtcatgggacttttacaagaagtaaaactgggctataaaaatgatccccttcccctcactagagaagggaggttctattcctctctctgtctttccctctctctatatataccaaaggtcaaatctttggtattttgcattgagtctttaattattcattcactttgacctagtaattgcacttcaga

SEQ ID NO: 49 - DNA, 2206 bp, Homo sapiens
ccccatgttaacggcccccagtgtggactgtcagctccatgaaggcagggccctacttatctcgttcacagcacaaggccgggcacacagtaggtgctcactcaacattcctgggatcaatgggaaatgactgtcggggaaccctctgcagccgtccttgtcgagggccccagatggggtgtgggtggcccctccccatccagatggtgttggaggggctgggggccaggcatggcgagcaggccgaggctgcaggtggacatccctgggactggagctgctgggggccaggctgcagttccagcccaggtcaggtctcatgtgaggcctccgtgaaacaagaatttctctctccgtttccttctcctgtctgactcacactttcgttttgaagttccccctttctgccagtgctttgcctgaggttacggagtggtcaagcgaggccagcagggcgtggagaccaggaggaagctgggctgcagtttcattcacaaaaacacgacccgcccgcttcctgtgtcctgcctgggctgcccggcccgcagccctacagccagttcacagggtgtttgcaagtttgcaggggccagtgagggtgctcctggggtttaagaggcttgagtttgtccaccccacggcctctgtcaggacccccccttcccgccactatgcttctgtctcccacggtgcctcccagctcacccccacaggggcctggcgcagagcctcaaactcaggattctataggagctgagggttgggtctgagcaccttggcgcttcccctggccccactgacccatccttgtttcagcacagagctgggaggcccagggaggatggcctctgctgactggtccagctccctctgtggttcccacctctcagtgtggggtggatccaagggggagggaagagaaggggatgggaagaaaacgatgcctgttggggcacaggctcctaaacccaacctcgtatcgcctcctgcgagtagcttccaggtgtccacagggagcccggggtcatgctggcatcattcattctccacgcatcagatgatcctgtggcccctcagtgccaggccccactggccctctgcgcacatcagtgactctgatgttctcccccaccgcatgctgccaatctgatggtggagacagaacagcagtcccggatggtggaggcaatgcccagagctgtggcagccaccttgcagccgtgaagcaccagtgggaatgacagtcaagagaaccacggagatgccagcccctggacccacagcagcagcacctgcttccagactcagagtgtgagaaaaaaataaactcctatttgtttatggcaagagacaaggtctagctctgtgatgcaggccggaggacagtggtgtgatcacagctcactgcagccttgaactcctgggttccagcaatcctcccacctcagcctccttagtaggcgtggctacagtaatggaagacagcaaaagaagtttggagattcctggtttaaagcatttaaagcctctgtgaaaatttgcccaggccaacaacttcactttccacactcagtgccacgaagtgcagctctaagctggggatttctgtgcagagatgatccactgagtgcaacccaccaccgtgcggacaccacccctgcagaatcatctgtgaaaacaaccccaggcccagacataggggccagctaagcttcgtagccctcgaaatacagggagtgccccctctggaccctcgagcccacagtccatccaccacagaggtgtctgctgctcatcagatagttcctaccaagaaaatgctgtgtgaacccatctgtgtggcaaaccggcacggggagaaagctgacttccaaggacgtctaccaactgtcacttgcaaaccagaacttgcctctttgtagatgaagactggcagggctgaagaaatgatctcatgttgaaattaatgatgagcttcagggtgaggtgactcagttcgaatgctgttgaatgttggtgtcatgggacttttacaagaagtaaaactgggctataaaaatgatccccttcccctcactagagaagggaggttctattcctctctctgtctttccctctctctatatataccaaaggtcaaatctttggtattttgcattgagtctttaattattcattcactttgacctagtaattgcacttcaga

SEQ ID NO: 50 - DNA, 1104 bp, Homo sapiens
tgactgcatgaggctgtacgtatctgcagcctgccccttttcatggtgtttatccactcacacagtgatgagcagtggtggaggcaatgcccagagctgtggcagccaccttgcagccgtgaagcaccagtgggaatgacagtcaagagaaccacggagatgccagcccctggacccacagcagcagcacctgcttccagactcagagtgtgagaaaaaaataaactcctatttgtttatggcaagagacaaggtctagctctgtgatgcaggccggaggacagtggtgtgatcacagctcactgcagccttgaactcctgggttccagcaatcctcccacctcagcctccttagtaggcgtggctacagtaatggaagacagcaaaagaagtttggagattcctggtttaaagcatttaaagcctctgtgaaaatttgcccaggccaacaacttcactttccacactcagtgccacgaagtgcagctctaagctggggatttctgtgcagagatgatccactgagtgcaacccaccaccgtgcggacaccacccctgcagaatcatctgtgaaaacaaccccaggcccagacataggggccagctaagcttcgtagccctcgaaatacagggagtgccccctctggaccctcgagcccacagtccatccaccacagaggtgtctgctgctcatcagatagttcctaccaagaaaatgctgtgtgaacccatctgtgtggcaaaccggcacggggagaaagctgacttccaaggacgtctaccaactgtcacttgcaaaccagaacttgcctctttgtagatgaagactggcagggctgaagaaatgatctcatgttgaaattaatgatgagcttcagggtgaggtgactcagttcgaatgctgttgaatgttggtgtcatgggacttttacaagaagtaaaactgggctataaaaatgatccccttcccctcactagagaagggaggttctattcctctctctgtctttccctctctctatatataccaaaggtcaaatctttggtattttgcattgagtctttaattattcattcactttgacctagtaattgcacttcaga

SEQ ID NO: 51 - DNA, 1614 bp, Homo sapiens
ccccatgttaacggcccccagtgtggactgtcagctccatgaaggcagggccctacttatctcgttcacagcacaaggccgggcacacagtaggtgctcactcaacattcctgggatcaatgggaaatgactgtcggggaaccctctgcagccgtccttgtcgagggccccagatggggtgtgggtggcccctccccatccagatggtgttggaggggctgggggccaggcatggcgagcaggccgaggctgcaggtggacatccctgggactggagctgctgggggccaggctgcagttccagcccaggtcaggtctcatgtgaggcctccgtgaaacaagaatttctctctccgtttccttctcctgtctgactcacactttcgttttgaagttccccctttctgccagtgctttgcctgaggttacggagtggtcaagcgaggccagcagggcgtggagaccaggaggaagctgggctgcagtttcattcacaaaaacacgacccgcccgcttcctgtgtcctgcctgggctgcccggcccgcagccctacagccagttcacagggtgtttgcaagtttgcaggggccagtgagggtgctcctggggtttaagaggcttgagtttgtccaccccacggcctctgtcaggacccccccttcccgccactatgcttctgtctcccacggtgcctcccagctcacccccacaggggcctggcgcagagcctcaaactcaggattctataggagctgagggttgggtctgagcaccttggcgcttcccctggccccactgacccatccttgtttcagcacagagctgggaggcccagggaggatggcctctgctgactggtccagctccctctgtggttcccacctctcagtgtggggtggatccaagggggagggaagagaaggggatgggaagaaaacgatgcctgttggggcacaggctcctaaacccaacctcgtatcgcctcctgcgagtagcttccaggtgtccacagggagcccggggtcatgctggcatcattcattctccacgcatcagatgatcctgtggcccctcagtgccaggccccactggccctctgcgcacatcagtgactctgatgttctcccccaccgcatgctgccaatctgatggtggagacagaacagcagtcccggatggtggaggcaatgcccagagctgtggcagccaccttgcagccgtgaagcaccagtgggaatgacagtcaagagaaccacggagatgccagcccctggacccacagcagcagcacctgcttccagactcagagtgtgagaaaaaaataaactcctatttgtttatggcaagagacaaggtctagctctgtgatgcaggccggaggacagtggtgtgatcacagctcactgcagccttgaactcctgggttccagcaatcctcccacctcagcctccttagtaggcgtggctacaggtgtgtaccaccatgtccagccctaaatttcattctttttaatttcaatattgttatgtgttttctaatgttttataacttattggtatggtagatgtacatgtatacaaattaaaagaaaatttatatatattttactggg

SEQ ID NO: 52 - DNA, 602 bp, Homo sapiens
taccttggctatccccctctgagttcttgccttgattctcctgttactgtcccgcgaacccacatccctacaaagcaggaaagtatgcttgggagaggccaagtgagtggggaatcagcccaaagccaggcgtccagggtctccctcacctgaagctgactttttccccaccttggacagagggcgggagatgccatccccactgaacccagtgctttcaccagccatattagctcccactcaccccccgtcgtggaagcctcggccgtcacacctgcagggccggggcgtgcatggcctcagggatggcctgttcagctgctgggtgactcgggtccaggtgcctcaccacctgctcgttgcctttgggctcagtgaagagtctggagtttatctggagtgaggtggccggttcttggtgggatctgagcaggtggaggcaatgcccagagctgtggcagccaccttgcagccgtgaagcaccagtgggaatgacagtcaagagaaccacggagatgccagcccctggacccacagcagcagcacctgcttccagactcagagtgtgagaaaaaaataaactcctatttgtttatggcaag

SEQ ID NO: 53 - DNA, 355 bp, Artificial Organism
  Synthetic oligonucleotide
taccttggctatccccctctgagttcttgccttgattctcctgttactgtcccgcgaacccacatccctacaaagcaggaaagtatgcttgggagaggccaagtgagtggggaatcagcccaaagccaggcgtccagggtctccctcacctgaagctgactttttccccaccttggacagagggcgggagatgccatccccactgaacccagtgctttcaccagccatattagctcccactcaccccccgtcgtggaagcctcggccgtcacacctgcagggccggggcgtgcatggcctcagggatggcctgttcagctgctgggtgactcgggtccaggtgcctcaccacctg

SEQ ID NO: 54 - DNA, 656 bp, Artificial Organism
  Synthetic oligonucleotide
gtaagaagcagggtctttcttatgttttaaggaaagccctgtggctgctgggtgggggaccagctggaggggcaggagggcagcaggtgactcattacaaggctggggccatcatcctgtgagagctgggcatgaccagtgcaggtcagtggggttgagggtacagaccagtgggacccacagacggctcgggagtgaccaagcctctgctgagctgcccaggtcccctctggtggacacctcctacccggagccccccaaggtggtgccaaagctagaccaccatacagccagaggcctccaggccctacccacgacagcccagctggcttctgcccagccaccgtcacacacagagggcagccgtccccatggtccctagaggcggttgaggaccactgtgcctggagtcatctgtggctataaaccaggaggagaaggctgcccaccccctgccccagagatggggaggctggggccacccggtggatttgggcaggtcccagcttccaggatcatgaggtgaaaacgtgaagggaccctagaggccatggggacccaggcacagagcggcggcctctcatcctccccatggtcaaggaggtcagtgccttcccggggtggattacggatggtagtatcttccttctcctcag

SEQ ID NO: 55 - DNA, 260 bp, Artificial Organism
  Synthetic oligonucleotide
gctggacacttcgtggagggctccaaagccggcagatcccggggccgcctctgtctctcccaggccctgcgtgttgcggtgagaggagcatttgtgtctctgtggtttgctgctggagctggtgaccgggagagaaacaagggagacaagggtgcccagacaggtgcggggctcagccaggaggcagaagacgtggacgtgtcccgggccaggagggtcacagatgcaccacaaggcactctgtgtggcactgggaacag

SEQ ID NO: 56 - DNA, 1258 bp, Artificial Organism
  Synthetic oligonucleotide
gaattctgggagtcagtctgcaagggtggtgggcgttgctcacctgggagaagcctttagagtgggcgttgagcaggccattagctcgtgccctgaggaggtgcatgggcggcatgggctctccatggaaattatgtgggcgcgaatggatgtggctctgcgctcacctgggcgaggacttctggccggtgccggggcactctgcatgaccctggcagaatcgagctgccctgactatgaaaggggaagaagagcatgcctgaccctccaccggcaccccacccctcactgctccacctggggcctgcctctgcgggtggctgggtcctggctgactgttgtgactgttgaggccctgggggggtggcgcatgggagttaggaggactggccaggtggggcccactatgcacccacccccagtgtcaggtgcttctcctctcctcctccaccacctcctcctcctcctcctcatcatcatcctcacttgttgaggacgtcctgtgtgccaagtggtttatatgcccagcctcatttaatcctcagaatgactccatgaggtagctactaaaaccccccacttaacagatgaggaaactgaggcctagagaagctcaacaagttgcctaagttccaagtttcctctcccaactctcctaccctctcctcttccttctcctttctcccattcttccctgcctcttccctaactagacaattttttattgagtgtctcccaggtgcaggcatgagccaggtgctgggaaaatcatgataacccagctccttctggtcattttctcagctggttagaggctgggaggacacgcaagttcagctccagccgactggggcattggtggtagcccctggagacattgtgcaatggggctacgaggctgcatctggctccagggaagcgtgttgcaatccatgagtgatgtctgccatgcgtacaggcatggagagtgaggcgcctgtactgtctttctgtagaccctagactggtggggcctctgaaatgcatccagacactgtgctgggtgtgttgcatggccctcccaaccaattcagtatttttctccccattttccagggagaaatctaaggcgtcagaatgtaaggttcttattggaacccaggctccagggtccctggttttctgtgacatcatgctgcaggaccctgtttctctctttgctttggctgctggggagctcagaagggagctttaggcttgctctcagtcaccacattag

SEQ ID NO: 57 - DNA, 274 bp, Artificial Organism
  Synthetic oligonucleotide
tcgccgtctcctttgggctctgtctcctccctgctgtgcttcctgaggagcaggccggatgtaagttatcaactataaataaaaccaagacttccgttctggctctcactctagtttcctggtgcattttttttttttaaagttcttaatcaagggaggggatactcctaactgaagatgacatcagcatcagctggccccggggggcaggcccccagcccccaggcccgtgtgggccctgaatgcccccattatgaggggtaacctcattaca

SEQ ID NO: 58 - DNA, 1179 bp, Artificial Organism
  Synthetic oligonucleotide
ccccatgttaacggcccccagtgtggactgtcagctccatgaaggcagggccctacttatctcgttcacagcacaaggccgggcacacagtaggtgctcactcaacattcctgggatcaatgggaaatgactgtcggggaaccctctgcagccgtccttgtcgagggccccagatggggtgtgggtggcccctccccatccagatggtgttggaggggctgggggccaggcatggcgagcaggccgaggctgcaggtggacatccctgggactggagctgctgggggccaggctgcagttccagcccaggtcaggtctcatgtgaggcctccgtgaaacaagaatttctctctccgtttccttctcctgtctgactcacactttcgttttgaagttccccctttctgccagtgctttgcctgaggttacggagtggtcaagcgaggccagcagggcgtggagaccaggaggaagctgggctgcagtttcattcacaaaaacacgacccgcccgcttcctgtgtcctgcctgggctgcccggcccgcagccctacagccagttcacagggtgtttgcaagtttgcaggggccagtgagggtgctcctggggtttaagaggcttgagtttgtccaccccacggcctctgtcaggacccccccttcccgccactatgcttctgtctcccacggtgcctcccagctcacccccacaggggcctggcgcagagcctcaaactcaggattctataggagctgagggttgggtctgagcaccttggcgcttcccctggccccactgacccatccttgtttcagcacagagctgggaggcccagggaggatggcctctgctgactggtccagctccctctgtggttcccacctctcagtgtggggtggatccaagggggagggaagagaaggggatgggaagaaaacgatgcctgttggggcacaggctcctaaacccaacctcgtatcgcctcctgcgagtagcttccaggtgtccacagggagcccggggtcatgctggcatcattcattctccacgcatcagatgatcctgtggcccctcagtgccaggccccactggccctctgcgcacatcagtgactctgatgttctcccccaccgcatgctgccaatctgatggtggagacagaacagcagtcccggatg

SEQ ID NO: 59 - DNA, 169 bp, Artificial Organism
  Synthetic oligonucleotide
gtggaggcaatgcccagagctgtggcagccaccttgcagccgtgaagcaccagtgggaatgacagtcaagagaaccacggagatgccagcccctggacccacagcagcagcacctgcttccagactcagagtgtgagaaaaaaataaactcctatttgtttatggcaag

SEQ ID NO: 60 - DNA, 124 bp, Artificial Organism
  Synthetic oligonucleotide
agacaaggtctagctctgtgatgcaggccggaggacagtggtgtgatcacagctcactgcagccttgaactcctgggttccagcaatcctcccacctcagcctccttagtaggcgtggctacag

SEQ ID NO: 61 - DNA, 142 bp, Artificial Organism
  Synthetic oligonucleotide
gtgtgtaccaccatgtccagccctaaatttcattctttttaatttcaatattgttatgtgttttctaatgttttataacttattggtatggtagatgtacatgtatacaaattaaaagaaaatttatatatattttactggg

SEQ ID NO: 62 - DNA, 660 bp, Artificial Organism
  Synthetic oligonucleotide
gccaacaacttcactttccacactcagtgccacgaagtgcagctctaagctggggatttctgtgcagagatgatccactgagtgcaacccaccaccgtgcggacaccacccctgcagaatcatctgtgaaaacaaccccaggcccagacataggggccagctaagcttcgtagccctcgaaatacagggagtgccccctctggaccctcgagcccacagtccatccaccacagaggtgtctgctgctcatcagatagttcctaccaagaaaatgctgtgtgaacccatctgtgtggcaaaccggcacggggagaaagctgacttccaaggacgtctaccaactgtcacttgcaaaccagaacttgcctctttgtagatgaagactggcagggctgaagaaatgatctcatgttgaaattaatgatgagcttcagggtgaggtgactcagttcgaatgctgttgaatgttggtgtcatgggacttttacaagaagtaaaactgggctataaaaatgatccccttcccctcactagagaagggaggttctattcctctctctgtctttccctctctctatatataccaaaggtcaaatctttggtattttgcattgagtctttaattattcattcactttgacctagtaattgcacttcaga

SEQ ID NO: 63 - DNA, 31 bp, Artificial Organism
  Synthetic oligonucleotide
ctgagctctgtgtgatttctggacacttctg

SEQ ID NO: 64 - DNA, 78 bp, Artificial Organism
  Synthetic oligonucleotide
ctcgttgcctttgggctcagtgaagagtctggagtttatctggagtgaggtggccggttcttggtgggatctgagcag

SEQ ID NO: 65 - DNA, 94 bp, Artificial Organism
  Synthetic oligonucleotide
agtccattcaggagcaggaaagttcatctcagaccctaaatccagccacgtcatgccacgcttaacacctctaacaacttcccctggcacttag

SEQ ID NO: 66 - DNA, 74 bp, Artificial Organism
  Synthetic oligonucleotide
gacagcgtctggctccttccctcggctcatggccctcagaatctgcgtcacatacaccccagctctcccgatag

SEQ ID NO: 67 - DNA, 95 bp, Artificial Organism
  Synthetic oligonucleotide
gtctctgcactcgctgttgcctctgcctggaacagtctccctcctggtgtcattgtctccgtggtgtgtccttcctgaccttccacctccaccag

SEQ ID NO: 68 - DNA, 96 bp, Artificial Organism
  Synthetic oligonucleotide
gtgccgacacttccctgaccccagtaacctcttctcttgggtgggtgaatgccacctgctgatgtctgatttattcatcggttttcttgtctgtag

SEQ ID NO: 69 - DNA, 48 bp, Artificial Organism
  Synthetic oligonucleotide
tctgtcccccttggggacagggactcgttgctcatgttcacccggcag

SEQ ID NO: 70 - DNA, 22 bp, Artificial Organism
  Synthetic oligonucleotide
ctcaggggtttgggcatttttg

SEQ ID NO: 71 - DNA, 77 bp, Artificial Organism
  Synthetic oligonucleotide
tgactgcatgaggctgtacgtatctgcagcctgccccttttcatggtgtttatccactcacacagtgatgagcagtg

SEQ ID NO: 72 - DNA, 74 bp, Artificial Organism
  Synthetic oligonucleotide
taatggaagacagcaaaagaagtttggagattcctggtttaaagcatttaaagcctctgtgaaaatttgcccag

SEQ ID NO: 73 - protein, 313 aa, Homo sapiens
MALRICVTYTPALPIGLCTRCCLCLEQSPSWCHCLRGVSFLTFHLHQSVPLGDRDSLLMFTRQAGHFVEGSKAGRSRGRLCLSQALRVAVRGAFVSLWFAAGAGDRERNKGDKGAQTGAGLSQEAEDVDVSRARRVTDAPQGTLCGTGNRNSGSQSARAVGVAHLGEAFRVGVEQAISSCPEEVHGRHGLSMEIMWARMDVALRSPGRGLLAGAGALCVTLAESSCPDYERGRRACLTLHRHPTPHCSTWGLPLRVAGSWLTVVTVEALGGWRMGVRRTGQVGPTMHPPPVSGASPLLLHHLLLLLLIIILTC

SEQ ID NO: 74 - protein, 313 aa, Homo sapiens
MALRICVTYTPALPIGLCTRCCLCLEQSPSWCHCLRGVSFLTFHLHQSVPLGDRDSLLMFTRQAGHFVEGSKAGRSRGRLCLSQALRVAVRGAFVSLWFAAGAGDRERNKGDKGAQTGAGLSQEAEDVDVSRARRVTDAPQGTLCGTGNRNSGSQSARVVGVAHLGEAFRVGVEQAISSCPEEVHGRHGLSMEIMWARMDVALRSPGRGLLAGAGALCMTLAESSCPDYERGRRACLTLHRHPTPHCSTWGLPLRVAGSWLTVVTVEALGGWRMGVRRTGQVGPTMHPPPVSGASPLLLHHLLLLLLIIILTC

SEQ ID NO: 75 - protein, 313 aa, Homo sapiens
MALRICVTYTPALPIGLCTRCCLCLEQSPSWCHCLRGVSFLTFHLHQSVPLGDRDSLLMFTRQAGHFVEGSKAGRSRGRLCLSQALRVAVRGAFVSLWFAAGAGDRERNKGDKGAQTGAGLSQEAEDVDVSRARRVTDAPQGTLCGTGNRNSGSQSARAVGVAHLGEAFRVGVEQAISSCPEEVHGRHGLSMEIMWARMDVALRSPGRGLLAGAGALCMTLAESSCPDYERGRRACLTLHRHPTPHCSTWGLPLRVAGSWLTVVTVEALGGWRMGVRRTGQVGPTMHPPPVSGASPLLLHHLLLLLLIIILTC

SEQ ID NO: 76 - protein, 313 aa, Homo sapiens
MALRICVTYTPALPIGLCTRCCLCLEQSPSWCHCLRGVSFLTFHLHQSVPLGDRDSLLMFTRQAGHFVEGSKAGRSRGRLCLSQALRVAVRGAFVSLWFAAGAGDRERNKGDKGAQTGAGLSQEAEDVDVSRARRVTDAPQGTLCGTGNRNSGSQSARAVGVAHLGEAFRVGVEQAISSCPEEVHGRHGLSMEIMWAQMDVALRSPGRGLLAGAGALCMTLAESSCPDYERGRRACLTLHRHPTPHCSTWGLPLRVAGSWLTVVTVEALGRWRMGVRRTGQVGPTMHPPPVSGASPLLLHHLLLLLLIIILTC

SEQ ID NO: 77 - protein, 313 aa, Homo sapiens; identical to SEQ ID NO: 74

SEQ ID NO: 78 - protein, 255 aa, Homo sapiens
MFTRQAGHFVEGSKAGRSRGRLCLSQALRVAVRGAFVSLWFAAGAGDRERNKGDKGAQTGAGLSQEAEDVDVSRARRVTDAPQGTLCGTGNRNSGSQSARVVGVAHLGEAFRVGVEQAISSCPEEVHGRHGLSMEIMWARMDVALRSPGRGLLAGAGALCMTLAESSCPDYERGRRACLTLHRHPTPHCSTWGLPLRVAGSWLTVVTVEALGGWRMGVRRTGQVGPTMHPPPVSGASPLLLHHLLLLLLIIILTC

SEQ ID NO: 79 - protein, 191 aa, Homo sapiens
MSDLFIGFLVCSLSPLGTGTRCSCSPGRNSGSQSARVVGVAHLGEAFRVGVEQAISSCPEEVHGRHGLSMEIMWARMDVALRSPGRGLLAGAGALCMTLAESSCPDYERGRRACLTLHRHPTPHCSTWGLPLRVAGSWLTVVTVEALGGWRMGVRRTGQVGPTMHPPPVSGASPLLLHHLLLLLLIIILTC

SEQ ID NO: 80 - protein, 122 aa, Homo sapiens
MEIMWARMDVALRSPGRGLLAGAGALCMTLAESSCPDYERGRRACLTLHRHPTPHCSTWGLPLRVAGSWLTVVTVEALGGWRMGVRRTGQVGPTMHPPPVSGASPLLLHHLLLLLLIIILTC

SEQ ID NO: 81 - protein, 111 aa, Homo sapiens
MKAGPYLSRSQHKAGHTVGAHSTFLGSMGNDCRGTLCSRPCRGPQMGCGWPLPIQMVLEGLGARHGEQAEAAGGHPWDWSCWGPGCSSSPGQVSCEASVKQEFLSPFPSPV

SEQ ID NO: 82 - protein, 70 aa, Homo sapiens
MPSPLNPVLSPAILAPTHPPSWKPRPSHLQGRGVHGLRDGLFSCWVTRVQVPHHLLVAFGLSEESGVYLE

SEQ ID NO: 83 - protein, 255 aa, Homo sapiens
MFTRQAGHFVEGSKAGRSRGRLCLSQALRVAVRGAFVSLWFAAGAGDRERNKGDKGAQTGAGLSQEAEDVDVSRARRVTDAPQGTLCGTGNRNSGSQSARAVGVAHLGEAFRVGVEQAISSCPEEVHGRHGLSMEIMWAQMDVALRSPGRGLLAGAGALCMTLAESSCPDYERGRRACLTLHRHPTPHCSTWGLPLRVAGSWLTVVTVEALGRWRMGVRRTGQVGPTMHPPPVSGASPLLLHHLLLLLLIIILTC

SEQ ID NO: 84 - protein, 313 aa, Homo sapiens; identical to SEQ ID NO: 73

SEQ ID NO: 85 - protein, 59 aa, Homo sapiens
MPSPLNPVLSPAILAPTHPPSWKPRPSHLQGRGVHGLRDGLFSCWVTRVQVPHHLLSSV

SEQ ID NO: 86 - protein, 56 aa, Homo sapiens
MVFIHSHSDEQWWRQCPELWQPPCSREAPVGMTVKRTTEMPAPGPTAAAPASRLRV

SEQ ID NO: 87 - DNA, 3487 bp, Homo sapiens
cgcaggtgagctgcagaggcgcgcgtggtccctgccccacccgcgcggagctccctcccctttttttccgccttctgccagcagaagcagcagccgcagcacctgagccgctactgccgctcactcaggacaacgctatggctgagcctgggcacagccaccatctctccgccagagtcaggggaagaactgagaggcgcataccccggctgtggcggctgctgctctgggctgggaccgccttccaggtgacccagggaacgggaccggagcttcatgcctgcaaagagtctgagtaccactatgagtacacggcgtgtgacagcacgggttccaggtggagggtcgccgtgccgcataccccgggcctgtgcaccagcctgcctgaccccgtcaagggcaccgagtgctccttctcctgcaacgccggggagtttctggatatgaaggaccagtcatgtaagccatgcgctgagggccgctactccctcggcacaggcattcggtttgatgagtgggatgagctgccccatggctttgccagcctctcagccaacatggagctggatgacagtgctgctgagtccaccgggaactgtacttcgtccaagtgggttccccggggcgactacatcgcctccaacacggacgaatgcacagccacactgatgtacgccgtcaacctgaagcaatctggcaccgttaacttcgaatactactatccagactccagcatcatctttgagtttttcgttcagaatgaccagtgccagcccaatgcagatgactccaggtggatgaagaccacagagaaaggatgggaattccacagtgtggagctaaatcgaggcaataatgtcctctattggagaaccacagccttctcagtatggaccaaagtacccaagcctgtgctggtgagaaacattgccataacaggggtggcctacacttcagaatgcttcccctgcaaacctggcacgtatgcagacaagcagggctcctctttctgcaaactttgcccagccaactcttattcaaataaaggagaaacttcttgccaccagtgtgaccctgacaaatactcagagaaaggatcttcttcctgtaacgtgcgcccagcttgcacagacaaagattatttctacacacacacggcctgcgatgccaacggagagacacaactcatgtacaaatgggccaagccgaaaatctgtagcgaggaccttgagggggcagtgaagctgcctgcctctggtgtgaagacccactgcccaccctgcaacccaggcttcttcaaaaccaacaacagcacctgccagccctgcccatatggttcctactccaatggctcagactgtacccgctgccctgcagggactgaacctgctgtgggatttgaatacaaatggtggaacacgctgcccacaaacatggaaacgaccgttctcagtgggatcaacttcgagtacaagggcatgacaggctgggaggtggctggtgatcacatttacacagctgctggagcctcagacaatgacttcatgattctcactctggttgtgccaggatttaggtccctgcttcccatccctgggatgttgctcagtttgccttcccttaacacacattactcagagctagccagatgaatgaagcctgtgtttgcaagacctccgcagtcggtgatggcagacacagagaataaagaggtggccagaatcacatttgtctttgagaccctctgttctgtgaactgtgagctctacttcatggtgggtgtgaattctaggaccaacactcctgtggagacgtggaaaggttccaaaggcaaacagtcctatacctacatcattgaggagaacactaccacgagcttcacctgggccttccagaggaccacttttcatgaggcaagcaggaagtacaccaatgacgttgccaagatctactccatcaatgtcaccaatgttatgaatggcgtggcctcctactgccgtccctgtgccctagaagcctctgatgtgggctcctcctgcacctcttgtcctgctggttactatattgaccgagattcaggaacctgccactcctgcccccctaacacaattctgaaagcccaccagccttatggtgtccaggcctgtgtgccctgtggtccagggaccaagaacaacaagatccactctctgtgctacaatgattgcaccttctcacgcaacactccaaccaggactttcaactacaacttctccgctttggcaaacaccgtcactcttgctggagggccaagcttcacttccaaagggttgaaatacttccatcactttaccctcagtctctgtggaaaccagggtaggaaaatgtctgtgtgcaccgacaatgtcactgacctccggattcctgagggtgagtcagggttctccaaatctatcacagcctacgtctgccaggcagtcatcatccccccagaggtgacaggctacaaggccggggtttcctcacagcctgtcagccttgctgatcgacttattggggtgacaacagatatgactctggatggaatcacctccccagctgaacttttccacctggagtccttgggaataccggacgtgatcttcttttataggtccaatgatgtgacccagtcctgcagttctgggagatcaaccaccatccgcgtcaggtgcagtccacagaaaactgtccctggaagtttgctgctgccaggaacgtgctcagatgggacctgtgatggctgcaacttccacttcctgtgggagagcgcggctgcttgcccgctctgctcagtggctgactaccatgctatcgtcagcagctgtgtggctgggatccagaagactacttacgtgtggcgagaacccaagctatgctctggtggcatttctctgcctgagcagagagtcaccatctgcaaaaccatagatttctggctgaaagtgggcatctctgcaggcacctgtactgccatcctgctcaccgtcttgacctgctacttttggaaaaagaatcaaaaactagagtacaagtactccaagctggtgatgaatgctactctcaaggactgtgacctgccagcagctgacagctgcgccatcatggaaggcgaggatgtagaggacgacctcatctttaccagcaagaagtcactctttgggaagatcaaatcatttacctccaagaggactcctgatggatttgactcagtgccgctgaagacatcctcaggaggcccagacatggacctgtgagaggcactgcctgcctcacctgcctcctcaccttgcatagcacctttgcaagcctgcggcgatttgggtgccagcatcctgcaacacccactgctggaaatctcttcattgtggccttatcagatgtttgaatttcagatctttttttatagagtacccaaaccctcctttctgcttgcctcaaacctgccaaatatacccacactttgttt

SEQ ID NO: 88 - DNA, 3645 bp, Homo sapiens
cgcaggtgagctgcagaggcgcgcgtggtccctgccccacccgcgcggagctccctcccctttttttccgccttctgccagcagaagcagcagccgcagcacctgagccgctactgccgctcactcaggacaacgctatggctgagcctgggcacagccaccatctctccgccagagtcaggggaagaactgagaggcgcataccccggctgtggcggctgctgctctgggctgggaccgccttccaggtgacccagggaacgggaccggagcttcatgcctgcaaagagtctgagtaccactatgagtacacggcgtgtgacagcacgggttccaggtggagggtcgccgtgccgcataccccgggcctgtgcaccagcctgcctgaccccgtcaagggcaccgagtgctccttctcctgcaacgccggggagtttctggatatgaaggaccagtcatgtaagccatgcgctgagggccgctactccctcggcacaggcattcggtttgatgagtgggatgagctgccccatggctttgccagcctctcagccaacatggagctggatgacagtgctgctgagtccaccgggaactgtacttcgtccaagtgggttccccggggcgactacatcgcctccaacacggacgaatgcacagccacactgatgtacgccgtcaacctgaagcaatctggcaccgttaacttcgaatactactatccagactccagcatcatctttgagtttttcgttcagaatgaccagtgccagcccaatgcagatgactccaggtggatgaagaccacagagaaaggatgggaattccacagtgtggagctaaatcgaggcaataatgtcctctattggagaaccacagccttctcagtatggaccaaagtacccaagcctgtgctggtgagaaacattgccataacaggggtggcctacacttcagaatgcttcccctgcaaacctggcacgtatgcagacaagcagggctcctctttctgcaaactttgcccagccaactcttattcaaataaaggagaaacttcttgccaccagtgtgaccctgacaaatactcagagaaaggatcttcttcctgtaacgtgcgcccagcttgcacagacaaagattatttctacacacacacggcctgcgatgccaacggagagacacaactcatgtacaaatgggccaagccgaaaatctgtagcgaggaccttgagggggcagtgaagctgcctgcctctggtgtgaagacccactgcccaccctgcaacccaggcttcttcaaaaccaacaacagcacctgccagccctgcccatatggttcctactccaatggctcagactgtacccgctgccctgcagggactgaacctgctgtgggatttgaatacaaatggtggaacacgctgcccacaaacatggaaacgaccgttctcagtgggatcaacttcgagtacaagggcatgacaggctgggaggtggctggtgatcacatttacacagctgctggagcctcagacaatgacttcatgattctcactctggttgtgccaggatttagacctccgcagtcggtgatggcagacacagagaataaagaggtggccagaatcacatttgtctttgagaccctctgttctgtgaactgtgagctctacttcatggtggtacgttttcctttctttgcccgctagagggcctccaggggagggttagccccatctgccccattggtgtgtccacgtgactgacacccccccttgtagtgattccacagaggaaaggcccagactgaccagcagggacttcacagtttaacaagggtctcaccaaccgtgatggcacctgggatggcagccacatgggcacccacttcccctctggccatcgcacccgcttcacttgtctgtcctgggttcagggtgtgaattctaggaccaacactcctgtggagacgtggaaaggttccaaaggcaaacagtcctatacctacatcattgaggagaacactaccacgagcttcacctgggccttccagaggaccacttttcatgaggcaagcaggaagtacaccaatgacgttgccaagatctactccatcaatgtcaccaatgttatgaatggcgtggcctcctactgccgtccctgtgccctagaagcctctgatgtgggctcctcctgcacctcttgtcctgctggttactatattgaccgagattcaggaacctgccactcctgcccccctaacacaattctgaaagcccaccagccttatggtgtccaggcctgtgtgccctgtggtccagggaccaagaacaacaagatccactctctgtgctacaatgattgcaccttctcacgcaacactccaaccaggactttcaactacaacttctccgctttggcaaacaccgtcactcttgctggagggccaagcttcacttccaaagggttgaaatacttccatcactttaccctcagtctctgtggaaaccagggtaggaaaatgtctgtgtgcaccgacaatgtcactgacctccggattcctgagggtgagtcagggttctccaaatctatcacagcctacgtctgccaggcagtcatcatccccccagaggtgacaggctacaaggccggggtttcctcacagcctgtcagccttgctgatcgacttattggggtgacaacagatatgactctggatggaatcacctccccagctgaacttttccacctggagtccttgggaataccggacgtgatcttcttttataggtccaatgatgtgacccagtcctgcagttctgggagatcaaccaccatccgcgtcaggtgcagtccacagaaaactgtccctggaagtttgctgctgccaggaacgtgctcagatgggacctgtgatggctgcaacttccacttcctgtgggagagcgcggctgcttgcccgctctgctcagtggctgactaccatgctatcgtcagcagctgtgtggctgggatccagaagactacttacgtgtggcgagaacccaagctatgctctggtggcatttctctgcctgagcagagagtcaccatctgcaaaaccatagatttctggctgaaagtgggcatctctgcaggcacctgtactgccatcctgctcaccgtcttgacctgctacttttggaaaaagaatcaaaaactagagtacaagtactccaagctggtgatgaatgctactctcaaggactgtgacctgccagcagctgacagctgcgccatcatggaaggcgaggatgtagaggacgacctcatctttaccagcaagaagtcactctttgggaagatcaaatcatttacctccaagaggactcctgatggatttgactcagtgccgctgaagacatcctcaggaggcccagacatggacctgtgagaggcactgcctgcctcacctgcctcctcaccttgcatagcacctttgcaagcctgcggcgatttgggtgccagcatcctgcaacacccactgctggaaatctcttcattgtggccttatcagatgtttgaatttcagatctttttttatagagtacccaaaccctcctttctgcttgcctcaaacctgccaaatatacccacactttgttt

SEQ ID NO: 89 - DNA, 3888 bp, Homo sapiens
cgcaggtgagctgcagaggcgcgcgtggtccctgccccacccgcgcggagctccctcccctttttttccgccttctgccagcagaagcagcagccgcagcacctgagccgctactgccgctcactcaggacaacgctatggctgagcctgggcacagccaccatctctccgccagagtcaggggaagaactgagaggcgcataccccggctgtggcggctgctgctctgggctgggaccgccttccaggtgacccagggaacgggaccggagcttcatgcctgcaaagagtctgagtaccactatgagtacacggcgtgtgacagcacgggttccaggtggagggtcgccgtgccgcataccccgggcctgtgcaccagcctgcctgaccccgtcaagggcaccgagtgctccttctcctgcaacgccggggagtttctggatatgaaggaccagtcatgtaagccatgcgctgagggccgctactccctcggcacaggcattcggtttgatgagtgggatgagctgccccatggctttgccagcctctcagccaacatggagctggatgacagtgctgctgagtccaccgggaactgtacttcgtccaagtgggttccccggggcgactacatcgcctccaacacggacgaatgcacagccacactgatgtacgccgtcaacctgaagcaatctggcaccgttaacttcgaatactactatccagactccagcatcatctttgagtttttcgttcagaatgaccagtgccagcccaatgcagatgactccaggtggatgaagaccacagagaaaggatgggaattccacagtgtggagctaaatcgaggcaataatgtcctctattggagaaccacagccttctcagtatggaccaaagtacccaagcctgtgctggtgagaaacattgccataacaggggtggcctacacttcagaatgcttcccctgcaaacctggcacgtatgcagacaagcagggctcctctttctgcaaactttgcccagccaactcttattcaaataaaggagaaacttcttgccaccagtgtgaccctgacaaatactcagagaaaggatcttcttcctgtaacgtgcgcccagcttgcacagacaaagattatttctacacacacacggcctgcgatgccaacggagagacacaactcatgtacaaatgggccaagccgaaaatctgtagcgaggaccttgagggggcagtgaagctgcctgcctctggtgtgaagacccactgcccaccctgcaacccaggcttcttcaaaaccaacaacagcacctgccagccctgcccatatggttcctactccaatggctcagactgtacccgctgccctgcagggactgaacctgctgtgggatttgaatacaaatggtggaacacgctgcccacaaacatggaaacgaccgttctcagtgggatcaacttcgagtacaagggcatgacaggctgggaggtggctggtgatcacatttacacagctgctggagcctcagacaatgacttcatgattctcactctggttgtgccaggatttagacctccgcagtcggtgatggcagacacagagaataaagaggtggccagaatcacatttgtctttgagaccctctgttctgtgaactgtgagctctacttcatggtgggtgtgaattctaggaccaacactcctgtggagacgtggaaaggttccaaaggcaaacagtcctatacctacatcattgaggagaacactaccacgagcttcacctgggccttccagaggaccacttttcatgaggcaagcaggaagtacaccaatgacgttgccaagatctactccatcaatgtcaccaatgttatgaatggcgtggcctcctactgccgtccctgtgccctagaagcctctgatgtgggctcctcctgcacctcttgtcctgctggttactatattgaccgagattcaggaacctgccactcctgcccccctaacacaattctgaaagcccaccagccttatggtgtccaggcctgtgtgccctgtggtccagggaccaagaacaacaagatccactctctgtgctacaatgattgcaccttctcacgcaacactccaaccaggactttcaactacaacttctccgctttggcaaacaccgtcactcttgctggagggccaagcttcacttccaaagggttgaaatacttccatcactttaccctcagtctctgtggaaaccagggtaggaaaatgtctgtgtgcaccgacaatgtcactgacctccggattcctgagggtgagtcagggttctccaaatctatcacagcctacgtctgccaggcagtcatcatccccccagaggtgacaggctacaaggccggggtttcctcacagcctgtcagccttgctgatcgacttattggggtgacaacagatatgactctggatggaatcacctccccagctgaacttttccacctggagtccttgggaataccggacgtgatcttcttttataggtccaatgatgtgacccagtcctgcagttctgggagatcaaccaccatccgcgtcaggtgcagtccacagaaaactgtccctggaagtttgctgctgccaggaacgtgctcagatgggacctgtgatggctgcaacttccacttcctgtgggagagcgcggctgcttgcccgctctgctcagtggctgactaccatgctatcgtcagcagctgtgtggctgggatccagaagactacttacgtgtggcgagaacccaagctatgctctggtggcatttctctgcctgagcagagagtcaccatctgcaaaaccatagatttctggctgaaagtgggcatctctgcaggcacctgtactgccatcctgctcaccgtcttgacctgctacttttggaaaaagaatcaaaagtacatgttgcggtattggagtgtggggatggacagggttggattattgatcagggagaatatctgaaagtataaattaatggggtttttctctggagttggctacagactctgtgacttatccagtgcatggtttggttatcctgactcctgaacagggatggtaccacgtggcagtctataaatggatgttaaattctcaaaagcaaagagtatcctcagtttgctattattaacagtacagagaatgacattatgattttgatatttccattaaattttgagatcatagaaacagacagccttaaggaacaaagatcactgaactgggaactaagattccttctattaccccagccctgacaccattttaccatgcttcagtctccttacccatggcatgggaataggacctgttcatagcctaacctctctacctctttcccccttattcccacattttgggatcttgtctttcccatcctcctgttttatagactagagtacaagtactccaagctggtgatgaatgctactctcaaggactgtgacctgccagcagctgacagctgcgccatcatggaaggcgaggatgtagaggacgacctcatctttaccagcaagaagtcactctttgggaagatcaaatcatttacctccaagaggactcctgatggatttgactcagtgccgctgaagacatcctcaggaggcccagacatggacctgtgagaggcactgcctgcctcacctgcctcctcaccttgcatagcacctttgcaagcctgcggcgatttgggtgccagcatcctgcaacacccactgctggaaatctcttcattgtggccttatcagatgtttgaatttcagatctttttttatagagtacccaaaccctcctttctgcttgcctcaaacctgccaaatatacccacactttgttt

SEQ ID NO: 90 - DNA, 3398 bp, Homo sapiens
cgcaggtgagctgcagaggcgcgcgtggtccctgccccacccgcgcggagctccctcccctttttttccgccttctgccagcagaagcagcagccgcagcacctgagccgctactgccgctcactcaggacaacgctatggctgagcctgggcacagccaccatctctccgccagagtcaggggaagaactgagaggcgcataccccggctgtggcggctgctgctctgggctgggaccgccttccaggtgacccagggaacgggaccggagcttcatgcctgcaaagagtctgagtaccactatgagtacacggcgtgtgacagcacgggttccaggtggagggtcgccgtgccgcataccccgggcctgtgcaccagcctgcctgaccccgtcaagggcaccgagtgctccttctcctgcaacgccggggagtttctggatatgaaggaccagtcatgtaagccatgcgctgagggccgctactccctcggcacaggcattcggtttgatgagtgggatgagctgccccatggctttgccagcctctcagccaacatggagctggatgacagtgctgctgagtccaccgggaactgtacttcgtccaagtgggttccccggggcgactacatcgcctccaacacggacgaatgcacagccacactgatgtacgccgtcaacctgaagcaatctggcaccgttaacttcgaatactactatccagactccagcatcatctttgagtttttcgttcagaatgaccagtgccagcccaatgcagatgactccaggtggatgaagaccacagagaaaggatgggaattccacagtgtggagctaaatcgaggcaataatgtcctctattggagaaccacagccttctcagtatggaccaaagtacccaagcctgtgctggtgagaaacattgccataacaggggtggcctacacttcagaatgcttcccctgcaaacctggcacgtatgcagacaagcagggctcctctttctgcaaactttgcccagccaactcttattcaaataaaggagaaacttcttgccaccagtgtgaccctgacaaatactcagacacaactcatgtacaaatgggccaagccgaaaatctgtagcgaggaccttgagggggcagtgaagctgcctgcctctggtgtgaagacccactgcccaccctgcaacccaggcttcttcaaaaccaacaacagcacctgccagccctgcccatatggttcctactccaatggctcagactgtacccgctgccctgcagggactgaacctgctgtgggatttgaatacaaatggtggaacacgctgcccacaaacatggaaacgaccgttctcagtgggatcaacttcgagtacaagggcatgacaggctgggaggtggctggtgatcacatttacacagctgctggagcctcagacaatgacttcatgattctcactctggttgtgccaggatttaggtccctgcttcccatccctgggatgttgctcagtttgccttcccttaacacacattactcagagctagccagatgaatgaagcctgtgtttgcaagacctccgcagtcggtgatggcagacacagagaataaagaggtggccagaatcacatttgtctttgagaccctctgttctgtgaactgtgagctctacttcatggtgggtgtgaattctaggaccaacactcctgtggagacgtggaaaggttccaaaggcaaacagtcctatacctacatcattgaggagaacactaccacgagcttcacctgggccttccagaggaccacttttcatgaggcaagcaggaagtacaccaatgacgttgccaagatctactccatcaatgtcaccaatgttatgaatggcgtggcctcctactgccgtccctgtgccctagaagcctctgatgtgggctcctcctgcacctcttgtcctgctggttactatattgaccgagattcaggaacctgccactcctgcccccctaacacaattctgaaagcccaccagccttatggtgtccaggcctgtgtgccctgtggtccagggaccaagaacaacaagatccactctctgtgctacaatgattgcaccttctcacgcaacactccaaccaggactttcaactacaacttctccgctttggcaaacaccgtcactcttgctggagggccaagcttcacttccaaagggttgaaatacttccatcactttaccctcagtctctgtggaaaccagggtaggaaaatgtctgtgtgcaccgacaatgtcactgacctccggattcctgagggtgagtcagggttctccaaatctatcacagcctacgtctgccaggcagtcatcatccccccagaggtgacaggctacaaggccggggtttcctcacagcctgtcagccttgctgatcgacttattggggtgacaacagatatgactctggatggaatcacctccccagctgaacttttccacctggagtccttgggaataccggacgtgatcttcttttataggtccaatgatgtgacccagtcctgcagttctgggagatcaaccaccatccgcgtcaggtgcagtccacagaaaactgtccctggaagtttgctgctgccaggaacgtgctcagatgggacctgtgatggctgcaacttccacttcctgtgggagagcgcggctgcttgcccgctctgctcagtggctgactaccatgctatcgtcagcagctgtgtggctgggatccagaagactacttacgtgtggcgagaacccaagctatgctctggtggcatttctctgcctgagcagagagtcaccatctgcaaaaccatagatttctggctgaaagtgggcatctctgcaggcacctgtactgccatcctgctcaccgtcttgacctgctacttttggaaaaagaatcaaaaactagagtacaagtactccaagctggtgatgaatgctactctcaaggactgtgacctgccagcagctgacagctgcgccatcatggaaggcgaggatgtagaggacgacctcatctttaccagcaagaagtcactctttgggaagatcaaatcatttacctccaagaggactcctgatggatttgactcagtgccgctgaagacatcctcaggaggcccagacatggacctgtgagaggcactgcctgcctcacctgcctcctcaccttgcatagcacctttgcaagcctgcggcgatttgggtgccagcatcctgcaacacccactgctggaaatctcttcattgtggccttatcagatgtttgaatttcagatctttttttatagagtacccaaaccctcctttctgcttgcctcaaacctgccaaatatacccacactttgttt

SEQ ID NO: 91 - DNA, 3966 bp, Homo sapiens
cgcaggtgagctgcagaggcgcgcgtggtccctgccccacccgcgcggagctccctcccctttttttccgccttctgccagcagaagcagcagccgcagcacctgagccgctactgccgctcactcaggacaacgctatggctgagcctgggcacagccaccatctctccgccagagtcaggggaagaactgagaggcgcataccccggctgtggcggctgctgctctgggctgggaccgccttccaggtgacccagggaacgggaccggagcttcatgcctgcaaagagtctgagtaccactatgagtacacggcgtgtgacagcacgggttccaggtggagggtcgccgtgccgcataccccgggcctgtgcaccagcctgcctgaccccgtcaagggcaccgagtgctccttctcctgcaacgccggggagtttctggatatgaaggaccagtcatgtaagccatgcgctgagggccgctactccctcggcacaggcattcggtttgatgagtgggatgagctgccccatggctttgccagcctctcagccaacatggagctggatgacagtgctgctgagtccaccgggaactgtacttcgtccaagtgggttccccggggcgactacatcgcctccaacacggacgaatgcacagccacactgatgtacgccgtcaacctgaagcaatctggcaccgttaacttcgaatactactatccagactccagcatcatctttgagtttttcgttcagaatgaccagtgccagcccaatgcagatgactccaggtggatgaagaccacagagaaaggatgggaattccacagtgtggagctaaatcgaggcaataatgtcctctattggagaaccacagccttctcagtatggaccaaagtacccaagcctgtgctggtgagaaacattgccataacaggggtggcctacacttcagaatgcttcccctgcaaacctggcacgtatgcagacaagcagggctcctctttctgcaaactttgcccagccaactcttattcaaataaaggagaaacttcttgccaccagtgtgaccctgacaaatactcagagaaaggatcttcttcctgtaacgtgcgcccagcttgcacagacaaagattatttctacacacacacggcctgcgatgccaacggagagacacaactcatgtacaaatgggccaagccgaaaatctgtagcgaggaccttgagggggcagtgaagctgcctgcctctggtgtgaagacccactgcccaccctgcaacccaggcttcttcaaaaccaacaacagcacctgccagccctgcccatatggttcctactccaatggctcagactgtacccgctgccctgcagggactgaacctgctgtgggatttgaatacaaatggtggaacacgctgcccacaaacatggaaacgaccgttctcagtgggatcaacttcgagtacaagggcatgacaggctgggaggtggctggtgatcacatttacacagctgctggagcctcagacaatgacttcatgattctcactctggttgtgccaggatttagacctccgcagtcggtgatggcagacacagagaataaagaggtggccagaatcacatttgtctttgagaccctctgttctgtgaactgtgagctctacttcatggtgggtgtgaattctaggaccaacactcctgtggagacgtggaaaggttccaaaggcaaacagtcctatacctacatcattgaggagaacactaccacgagcttcacctgggccttccagaggaccacttttcatgaggcaagcaggaagtacaccaatgacgttgccaagatctactccatcaatgtcaccaatgttatgaatggcgtggcctcctactgccgtccctgtgccctagaagcctctgatgtgggctcctcctgcacctcttgtcctgctggttactatattgaccgagattcaggaacctgccactcctgcccccctaacacaattctgaaagcccaccagccttatggtgtccaggcctgtgtgccctgtggtccagggaccaagaacaacaagatccactctctgtgctacaatgattgcaccttctcacgcaacactccaaccaggactttcaactacaacttctccgctttggcaaacaccgtcactcttgctggagggccaagcttcacttccaaagggttgaaatacttccatcactttaccctcagtctctgtggaaaccagggtaggaaaatgtctgtgtgcaccgacaatgtcactgacctccggattcctgagggtgagtcagggttctccaaatctatcacagcctacgtctgccaggcagtcatcatccccccagaggtgacaggctacaaggccggggtttcctcacagcctgtcagccttgctgatcgacttattggggtgacaacagatatgactctggatggaatcacctccccagctgaacttttccacctggagtccttgggaataccggacgtgatcttcttttataggtccaatgatgtgacccagtcctgcagttctgggagatcaaccaccatccgcgtcaggtgcagtccacagaaaactgtccctggaagtttgctgctgccaggaacgtgctcagatgggacctgtgatggctgcaacttccacttcctgtgggagagcgcggctgcttgcccgctctgctcagtggctgactaccatgctatcgtcagcagctgtgtggctgggatccaggtgggtttccctctgatcgggcacttccatgagagaagggaatgggagatctgagttccttgtttttctccccaacagaagactacttacgtgtggcgagaacccaagctatgctctggtggcatttctctgcctgagcagagagtcaccatctgcaaaaccatagatttctggctgaaagtgggcatctctgcaggcacctgtactgccatcctgctcaccgtcttgacctgctacttttggaaaaagaatcaaaagtacatgttgcggtattggagtgtggggatggacagggttggattattgatcagggagaatatctgaaagtataaattaatggggtttttctctggagttggctacagactctgtgacttatccagtgcatggtttggttatcctgactcctgaacagggatggtaccacgtggcagtctataaatggatgttaaattctcaaaagcaaagagtatcctcagtttgctattattaacagtacagagaatgacattatgattttgatatttccattaaattttgagatcatagaaacagacagccttaaggaacaaagatcactgaactgggaactaagattccttctattaccccagccctgacaccattttaccatgcttcagtctccttacccatggcatgggaataggacctgttcatagcctaacctctctacctctttcccccttattcccacattttgggatcttgtctttcccatcctcctgttttatagactagagtacaagtactccaagctggtgatgaatgctactctcaaggactgtgacctgccagcagctgacagctgcgccatcatggaaggcgaggatgtagaggacgacctcatctttaccagcaagaagtcactctttgggaagatcaaatcatttacctccaagaggactcctgatggatttgactcagtgccgctgaagacatcctcaggaggcccagacatggacctgtgagaggcactgcctgcctcacctgcctcctcaccttgcatagcacctttgcaagcctgcggcgatttgggtgccagcatcctgcaacacccactgctggaaatctcttcattgtggccttatcagatgtttgaatttcagatctttttttatagagtacccaaaccctcctttctgcttgcctcaaacctgccaaatatacccacactttgttt

SEQ ID NO: 92 - DNA, 723 bp, Homo sapiens
cgcaggtgagctgcagaggcgcgcgtggtccctgccccacccgcgcggagctccctcccctttttttccgccttctgccagcagaagcagcagccgcagcacctgagccgctactgccgctcactcaggacaacgctatggctgagcctgggcacagccaccatctctccgccagagtcaggggaagaactgagaggcgcataccccggctgtggcggctgctgctctgggctgggaccgccttccaggtgacccagggaacgggaccggagcttcatgcctgcaaagagtctgagtaccactatgagtacacggcgtgtgacagcacgggttccaggtggagggtcgccgtgccgcataccccgggcctgtgcaccagcctgcctgaccccgtcaagggcaccgagtgctccttctcctgcaacgccggggagtttctggatatgaaggaccagtcatgtaagccatgcgctgagggccgctactccctcggcacaggcattcggtttgatgagtgggatgagctgccccatggctttgccagcctctcagccaacatggagctggatgacagtgctgctgagtccaccgggaactgtacttcagacgaggaactggaagctcagcaaggttatgacctgctctttgttatccggtttacagccggcgagattgaaattcgaacccaagcttccactgctccataatgccacattcaaataa

SEQ ID NO: 93 - DNA, 206 bp, Homo sapiens
aagcagcagccgcagcacctgagccgctactgccgctcactcaggacaacgctatggctgagcctgggcacagccaccatctctccgccagagtcaggggaagaactgagaggcgcataccccggctgtggcggctgctgctctgggctgggaccgccttccaggtgacccagggaacgggaccggagcttcatgcctgcaaagag

SEQ ID NO: 94 - DNA, 121 bp, Homo sapiens
tctgagtaccactatgagtacacggcgtgtgacagcacgggttccaggtggagggtcgccgtgccgcataccccgggcctgtgcaccagcctgcctgaccccgtcaagggcaccgagtgct

SEQ ID NO: 95 - DNA, 193 bp, Homo sapiens
ccttctcctgcaacgccggggagtttctggatatgaaggaccagtcatgtaagccatgcgctgagggccgctactccctcggcacaggcattcggtttgatgagtgggatgagctgccccatggctttgccagcctctcagccaacatggagctggatgacagtgctgctgagtccaccgggaactgtacttc

SEQ ID NO: 96 - DNA, 148 bp, Homo sapiens
gtccaagtgggttccccggggcgactacatcgcctccaacacggacgaatgcacagccacactgatgtacgccgtcaacctgaagcaatctggcaccgttaacttcgaatactactatccagactccagcatcatctttgagtttttc

SEQ ID NO: 97 - DNA, 150 bp, Homo sapiens
gggtggcctacacttcagaatgcttcccctgcaaacctggcacgtatgcagacaagcagggctcctctttctgcaaactttgcccagccaactcttattcaaataaaggagaaacttcttgccaccagtgtgaccctgacaaatactcag

SEQ ID NO: 98 - DNA, 178 bp, Homo sapiens
acacaactcatgtacaaatgggccaagccgaaaatctgtagcgaggaccttgagggggcagtgaagctgcctgcctctggtgtgaagacccactgcccaccctgcaacccaggcttcttcaaaaccaacaacagcacctgccagccctgcccatatggttcctactccaatggctcag

SEQ ID NO: 99 - DNA, 129 bp, Homo sapiens
actgtacccgctgccctgcagggactgaacctgctgtgggatttgaatacaaatggtggaacacgctgcccacaaacatggaaacgaccgttctcagtgggatcaacttcgagtacaagggcatgacag

SEQ ID NO: 100 - DNA, 254 bp, Homo sapiens
gtacgttttcctttctttgcccgctagagggcctccaggggagggttagccccatctgccccattggtgtgtccacgtgactgacacccccccttgtagtgattccacagaggaaaggcccagactgaccagcagggacttcacagtttaacaagggtctcaccaaccgtgatggcacctgggatggcagccacatgggcacccacttcccctctggccatcgcacccgcttcacttgtctgtcctgggttcag

SEQ ID NO: 101 - DNA, 138 bp, Homo sapiens
ggtgtgaattctaggaccaacactcctgtggagacgtggaaaggttccaaaggcaaacagtcctatacctacatcattgaggagaacactaccacgagcttcacctgggccttccagaggaccacttttcatgaggca

SEQ ID NO: 102 - DNA, 264 bp, Homo sapiens
agcaggaagtacaccaatgacgttgccaagatctactccatcaatgtcaccaatgttatgaatggcgtggcctcctactgccgtccctgtgccctagaagcctctgatgtgggctcctcctgcacctcttgtcctgctggttactatattgaccgagattcaggaacctgccactcctgcccccctaacacaattctgaaagcccaccagccttatggtgtccaggcctgtgtgccctgtggtccagggaccaagaacaacaag

SEQ ID NO: 103 - DNA, 174 bp, Homo sapiens
atccactctctgtgctacaatgattgcaccttctcacgcaacactccaaccaggactttcaactacaacttctccgctttggcaaacaccgtcactcttgctggagggccaagcttcacttccaaagggttgaaatacttccatcactttaccctcagtctctgtggaaaccag

SEQ ID NO: 104 - DNA, 127 bp, Homo sapiens
aacgtgctcagatgggacctgtgatggctgcaacttccacttcctgtgggagagcgcggctgcttgcccgctctgctcagtggctgactaccatgctatcgtcagcagctgtgtggctgggatccag

SEQ ID NO: 105 - DNA, 179 bp, Homo sapiens
aagactacttacgtgtggcgagaacccaagctatgctctggtggcatttctctgcctgagcagagagtcaccatctgcaaaaccatagatttctggctgaaagtgggcatctctgcaggcacctgtactgccatcctgctcaccgtcttgacctgctacttttggaaaaagaatcaaaa

SEQ ID NO: 106 - DNA, 485 bp, Homo sapiens
gtattggagtgtggggatggacagggttggattattgatcagggagaatatctgaaagtataaattaatggggtttttctctggagttggctacagactctgtgacttatccagtgcatggtttggttatcctgactcctgaacagggatggtaccacgtggcagtctataaatggatgttaaattctcaaaagcaaagagtatcctcagtttgctattattaacagtacagagaatgacattatgattttgatatttccattaaattttgagatcatagaaacagacagccttaaggaacaaagatcactgaactgggaactaagattccttctattaccccagccctgacaccattttaccatgcttcagtctccttacccatggcatgggaataggacctgttcatagcctaacctctctacctctttcccccttattcccacattttgggatcttgtctttcccatcctcctgttttatag

SEQ ID NO: 107 - DNA, 157 bp, Homo sapiens
gactcctgatggatttgactcagtgccgctgaagacatcctcaggaggcccagacatggacctgtgagaggcactgcctgcctcacctgcctcctcaccttgcatagcacctttgcaagcctgcggcgatttgggtgccagcatcctgcaacaccca

SEQ ID NO: 108 - DNA, 49 bp, Homo sapiens
cgcaggtgagctgcagaggcgcgcgtggtccctgccccacccgcgcgga

SEQ ID NO: 109 - DNA, 1 bp, Homo sapiens
g

SEQ ID NO: 110 - DNA, 31 bp, Homo sapiens
ctccctcccctttttttccgccttctgccag

SEQ ID NO: 111 - DNA, 3 bp, Homo sapiens
cag

SEQ ID NO: 112 - DNA, 119 bp, Homo sapiens
agacgaggaactggaagctcagcaaggttatgacctgctctttgttatccggtttacagccggcgagattgaaattcgaacccaagcttccactgctccataatgccacattcaaataa

SEQ ID NO: 113 - DNA, 81 bp, Homo sapiens
gttcagaatgaccagtgccagcccaatgcagatgactccaggtggatgaagaccacagagaaaggatgggaattccacagt

SEQ ID NO: 114 - DNA, 106 bp, Homo sapiens
gtggagctaaatcgaggcaataatgtcctctattggagaaccacagccttctcagtatggaccaaagtacccaagcctgtgctggtgagaaacattgccataacag

SEQ ID NO: 115 - DNA, 89 bp, Homo sapiens
agaaaggatcttcttcctgtaacgtgcgcccagcttgcacagacaaagattatttctacacacacacggcctgcgatgccaacggagag

SEQ ID NO: 116 - DNA, 91 bp, Homo sapiens
gctgggaggtggctggtgatcacatttacacagctgctggagcctcagacaatgacttcatgattctcactctggttgtgccaggatttag

SEQ ID NO: 117 - DNA, 96 bp, Homo sapiens
gtccctgcttcccatccctgggatgttgctcagtttgccttcccttaacacacattactcagagctagccagatgaatgaagcctgtgtttgcaag

SEQ ID NO: 118 - DNA, 106 bp, Homo sapiens
acctccgcagtcggtgatggcagacacagagaataaagaggtggccagaatcacatttgtctttgagaccctctgttctgtgaactgtgagctctacttcatggtg

SEQ ID NO: 119 - DNA, 90 bp, Homo sapiens
ggtaggaaaatgtctgtgtgcaccgacaatgtcactgacctccggattcctgagggtgagtcagggttctccaaatctatcacagcctac

SEQ ID NO: 120 - DNA, 42 bp, Homo sapiens
gtctgccaggcagtcatcatccccccagaggtgacaggctac

SEQ ID NO: 121 - DNA, 49 bp, Homo sapiens
aaggccggggtttcctcacagcctgtcagccttgctgatcgacttattg

SEQ ID NO: 122 - DNA, 56 bp, Homo sapiens
gggtgacaacagatatgactctggatggaatcacctccccagctgaacttttccac

SEQ ID NO: 123 - DNA, 41 bp, Homo sapiens
ctggagtccttgggaataccggacgtgatcttcttttatag

SEQ ID NO: 124 - DNA, 102 bp, Homo sapiens
gtccaatgatgtgacccagtcctgcagttctgggagatcaaccaccatccgcgtcaggtgcagtccacagaaaactgtccctggaagtttgctgctgccagg

SEQ ID NO: 125 - DNA, 78 bp, Homo sapiens
gtgggtttccctctgatcgggcacttccatgagagaagggaatgggagatctgagttccttgtttttctccccaacag

SEQ ID NO: 126 - DNA, 12 bp, Homo sapiens
gtacatgttgcg

SEQ ID NO: 127 - DNA, 48 bp, Homo sapiens
actagagtacaagtactccaagctggtgatgaatgctactctcaagga

SEQ ID NO: 128 - DNA, 118 bp, Homo sapiens
ctgtgacctgccagcagctgacagctgcgccatcatggaaggcgaggatgtagaggacgacctcatctttaccagcaagaagtcactctttgggaagatcaaatcatttacctccaag

SEQ ID NO: 129 - DNA, 2 bp, Homo sapiens
ag

SEQ ID NO: 130 - DNA, 17 bp, Homo sapiens
ctgctggaaatctcttc

SEQ ID NO: 131 - DNA, 3 bp, Homo sapiens
att

SEQ ID NO: 132 - DNA, 102 bp, Homo sapiens
gtggccttatcagatgtttgaatttcagatctttttttatagagtacccaaaccctcctttctgcttgcctcaaacctgccaaatatacccacactttgttt

SEQ ID NO: 133 - protein, 1013 aa, Homo sapiens
MAEPGHSHHLSARVRGRTERRIPRLWRLLLWAGTAFQVTQGTGPELHACKESEYHYEYTACDSTGSRWRVAVPHTPGLCTSLPDPVKGTECSFSCNAGEFLDMKDQSCKPCAEGRYSLGTGIRFDEWDELPHGFASLSANMELDDSAAESTGNCTSSKWVPRGDYIASNTDECTATLMYAVNLKQSGTVNFEYYYPDSSIIFEFFVQNDQCQPNADDSRWMKTTEKGWEFHSVELNRGNNVLYWRTTAFSVWTKVPKPVLVRNIAITGVAYTSECFPCKPGTYADKQGSSFCKLCPANSYSNKGETSCHQCDPDKYSEKGSSSCNVRPACTDKDYFYTHTACDANGETQLMYKWAKPKICSEDLEGAVKLPASGVKTHCPPCNPGFFKTNNSTCQPCPYGSYSNGSDCTRCPAGTEPAVGFEYKWWNTLPTNMETTVLSGINFEYKGMTGWEVAGDHIYTAAGASDNDFMILTLVVPGFRPPQSVMADTENKEVARITFVFETLCSVNCELYFMVGVNSRTNTPVETWKGSKGKQSYTYIIEENTTTSFTWAFQRTTFHEASRKYTNDVAKIYSINVTNVMNGVASYCRPCALEASDVGSSCTSCPAGYYIDRDSGTCHSCPTNTILKAHQPYGVQACVPCGPGTKNNKIHSLCYNDCTFSRNTPTRTFNYNFSALANTVTLAGGPSFTSKGLKYFHHFTLSLCGNQGRKMSVCTDNVTDLRIPEGESGFSKSITAYVCQAVIIPPEVTGYKAGVSSQPVSLADRLIGVTTDMTLDGITSPAELFHLESLGIPDVIFFYRSNDVTQSCSSGRSTTIRVRCSPQKTVPGSLLLPGTCSDGTCDGCNFHFLWESAAACPLCSVADYHAIVSSCVAGIQKTTYVWREPKLCSGGISLPEQRVTICKTIDFWLKVGISAGTCTAILLTVLTCYFWKKNQKLEYKYSKLVMNATLKDCDLPAADSCAIMEGEDVEDDLIFTSKKSLFGKIKSFTSKRTPDGFDSVPLKTSSGGLDMDL

SEQ ID NO: 134 - protein, 19 aa, Homo sapiens
AGVSSQPVSLADRLIGPMM

SEQ ID NO: 135 - protein, 580 aa, Homo sapiens
WWNTLPTNMETTVLSGINFEYKGMTGWEVAGDHIYTAAGASDNDFMILTLVVPGFRPPQSVMADTENKEVARITFVFETLCSVNCELYFMVGVNSRTNTPVETWKGSKGKQSYTYIIEENTTTSFTWAFQRTTFHEASRKYTNDVAKIYSINVTNVMNGVASYCRPCALEASDVGSSCTSCPAGYYIDRDSGTCHSCPPNTILKAHQPYGVQACVPCGPGTKNNKIHSLCYNDCTFSRNTPTRTFNYNFSALANTVTLAGGPSFTSKGLKYFHHFTLSLCGNQGRKMSVCTDNVTDLRIPEGESGFSKSITAYVCQAVIIPPEVTGYKAGVSSQPVSLADRLIGVTTDMTLDGITSPAELFHLESLGIPDVIFFYRSNDVTQSCSSGRSTTIRVRCSPQKTVPGSLLLPGTCSDGTCDGCNFHFLWESAAACPLCSVADYHAIVSSCVAGIQKTTYVWREPKLCSGGISLPEQRVTICKTIDFWLKVGISAGTCTAILLTVLTCYFWKKNQKLEYKYSKLVMNATLKDCDLPAADSCAIMEGEDVEDDLIFTSKKSLFGKIKSFTSKQPAPVTISLSEDS

SEQ ID NO: 136 - protein, 663 aa, Homo sapiens
MYKWAKPKICSEDLEGAVKLPASGVKTHCPPCNPGFFKTNNSTCQPCPYGSYSNGSDCTRCPAGTEPAVGFEYKWWNTLPTNMETTVLSGINFEYKGMTGWEVAGDHIYTAAGASDNDFMILTLVVPGFRPPQSVMADTENKEVARITFVFETLCSVNCELYFMVGVNSRTNTPVETWKGSKGKQSYTYIIEENTTTSFTWAFQRTTFHEASRKYTNDVAKIYSINVTNVMNGVASYCRPCALEASDVGSSCTSCPAGYYIDRDSGTCHSCPPNTILKAHQPYGVQACVPCGPGTKNNKIHSLCYNDCTFSRNTPTRTFNYNFSALANTVTLAGGPSFTSKGLKYFHHFTLSLCGNQGRKMSVCTDNVTDLRIPEGESGFSKSITAYVCQAVIIPPEVTGYKAGVSSQPVSLADRLIGVTTDMTLDGITSPAELFHLESLGIPDVIFFYRSNDVTQSCSSGRSTTIRVRCSPQKTVPGSLLLPGTCSDGTCDGCNFHFLWESAAACPLCSVADYHAIVSSCVAGIQKTTYVWREPKLCSGGISLPEQRVTICKTIDFWLKVGISAGTCTAILLTVLTCYFWKKNQKLEYKYSKLVMNATLKDCDLPAADSCAIMEGEDVEDDLIFTSKKSLFGKIKSFTSKRTPDGFDSVPLKTSSGGPDMDL

SEQ ID NO: 137 - protein, 995 aa, Homo sapiens [sequence omitted]

SEQ ID NO: 138 - protein, 663 aa, Homo sapiens
MYKWAKPKICSEDLEGAVKLPASGVKTHCPPCNPGFFKTNNSTCQPCPYGSYSNGSDCTRCPAGTEPAVGFEYKWWNTLPTNMETTVLSGINFEYKGMTGWEVAGDHIYTAAGASDNDFMILTLVVPGFRPPQSVMADTENKEVARITFVFETLCSVNCELYFMVGVNSRTNTPVETWKGSKGKQSYTYIIEENTTTSFTWAFQRTTFHEASRKYTNDVAKIYSINVTNVMNGVASYCRPCALEASDVGSSCTSCPAGYYIDRDSGTCHSCPTNTILKAHQPYGVQACVPCGPGTKNNKIHSLCYNDCTFSRNTPTRTFNYNFSALANTVTLAGGPSFTSKGLKYFHHFTLSLCGNQGRKMSVCTDNVTDLRIPEGESGFSKSITAYVCQAVIIPPEVTGYKAGVSSQPVSLADRLIGVTTDMTLDGITSPAELFHLESLGIPDVIFFYRSNDVTQSCSSGRSTTIRVRCSPQKTVPGSLLLPGTCSDGTCDGCNFHFLWESAAACPLCSVADYHAIVSSCVAGIQKTTYVWREPKLCSGGISLPEQRVTICKTIDFWLKVGISAGTCTAILLTVLTCYFWKKNQKLEYKYSKLVMNATLKDCDLPAADSCAIMEGEDVEDDLIFTSKKSLFGKIKSFTSKRTPDGFDSVPLKTSSGGLDMDL

SEQ ID NO: 139 - protein, 523 aa, Homo sapiens
MAEPGHSHHLSARVRGRTERRIPRLWRLLLWAGTAFQVTQGTGPELHACKESEYHYEYTACDSTGSRWRVAVPHTPGLCTSLPDPVKGTECSFSCNAGEFLDMKDQSCKPCAEGRYSLGTGIRFDEWDELPHGFASLSANMELDDSAAESTGNCTSSKWVPRGDYIASNTDECTATLMYAVNLKQSGTVNFEYYYPDSSIIFEFFVQNDQCQPNADDSRWMKTTEKGWEFHSVELNRGNNVLYWRTTAFSVWTKVPKPVLVRNIAITGVAYTSECFPCKPGTYADKQGSSFCKLCPANSYSNKGETSCHQCDPDKYSEKGSSSCNVRPACTDKDYFYTHTACDANGETQLMYKWAKPKICSEDLEGAVKLPASGVKTHCPPCNPGFFKTNNSTCQPCPYGSYSNGSDCTRCPAGTEPAVGFEYKWWNTLPTNMETTVLSGINFEYKGMTGWEVAGDHIYTAAGASDNDFMILTLVVPGFRPPQSVMADTENKEVARITFVFETLCSVNCELYFMVVRFPFFAR

SEQ ID NO: 140 - protein, 893 aa, Homo sapiens
MAEPGHSHHLSARVRGRTERRIPRLWRLLLWAGTAFQVTQGTGPELHACKESEYHYEYTACDSTGSRWRVAVPHTPGLCTSLPDPVKGTECSFSCNAGEFLDMKDQSCKPCAEGRYSLGTGIRFDEWDELPHGFASLSANMELDDSAAESTGNCTSSKWVPRGDYIASNTDECTATLMYAVNLKQSGTVNFEYYYPDSSIIFEFFVQNDQCQPNADDSRWMKTTEKGWEFHSVELNRGNNVLYWRTTAFSVWTKVPKPVLVRNIAITGVAYTSECFPCKPGTYADKQGSSFCKLCPANSYSNKGETSCHQCDPDKYSEKGSSSCNVRPACTDKDYFYTHTACDANGETQLMYKWAKPKICSEDLEGAVKLPASGVKTHCPPCNPGFFKTNNSTCQPCPYGSYSNGSDCTRCPAGTEPAVGFEYKWWNTLPTNMETTVLSGINFEYKGMTGWEVAGDHIYTAAGASDNDFMILTLVVPGFRPPQSVMADTENKEVARITFVFETLCSVNCELYFMVGVNSRTNTPVETWKGSKGKQSYTYIIEENTTTSFTWAFQRTTFHEASRKYTNDVAKIYSINVTNVMNGVASYCRPCALEASDVGSSCTSCPAGYYIDRDSGTCHSCPPNTILKAHQPYGVQACVPCGPGTKNNKIHSLCYNDCTFSRNTPTRTFNYNFSALANTVTLAGGPSFTSKGLKYFHHFTLSLCGNQGRKMSVCTDNVTDLRIPEGESGFSKSITAYVCQAVIIPPEVTGYKAGVSSQPVSLADRLIGVTTDMTLDGITSPAELFHLESLGIPDVIFFYRSNDVTQSCSSGRSTTIRVRCSPQKTVPGSLLLPGTCSDGTCDGCNFHFLWESAAACPLCSVADYHAIVSSCVAGIQVGFPLIGHFHERREWEI

SEQ ID NO: 141 - protein, 957 aa, Homo sapiens
MAEPGHSHHLSARVRGRTERRIPRLWRLLLWAGTAFQVTQGTGPELHACKESEYHYEYTACDSTGSRWRVAVPHTPGLCTSLPDPVKGTECSFSCNAGEFLDMKDQSCKPCAEGRYSLGTGIRFDEWDELPHGFASLSANMELDDSAAESTGNCTSSKWVPRGDYIASNTDECTATLMYAVNLKQSGTVNFEYYYPDSSIIFEFFVQNDQCQPNADDSRWMKTTEKGWEFHSVELNRGNNVLYWRTTAFSVWTKVPKPVLVRNIAITGVAYTSECFPCKPGTYADKQGSSFCKLCPANSYSNKGETSCHQCDPDKYSEKGSSSCNVRPACTDKDYFYTHTACDANGETQLMYKWAKPKICSEDLEGAVKLPASGVKTHCPPCNPGFFKTNNSTCQPCPYGSYSNGSDCTRCPAGTEPAVGFEYKWWNTLPTNMETTVLSGINFEYKGMTGWEVAGDHIYTAAGASDNDFMILTLVVPGFRPPQSVMADTENKEVARITFVFETLCSVNCELYFMVGVNSRTNTPVETWKGSKGKQSYTYIIEENTTTSFTWAFQRTTFHEASRKYTNDVAKIYSINVTNVMNGVASYCRPCALEASDVGSSCTSCPAGYYIDRDSGTCHSCPPNTILKAHQPYGVQACVPCGPGTKNNKIHSLCYNDCTFSRNTPTRTFNYNFSALANTVTLAGGPSFTSKGLKYFHHFTLSLCGNQGRKMSVCTDNVTDLRIPEGESGFSKSITAYVCQAVIIPPEVTGYKAGVSSQPVSLADRLIGVTTDMTLDGITSPAELFHLESLGIPDVIFFYRSNDVTQSCSSGRSTTIRVRCSPQKTVPGSLLLPGTCSDGTCDGCNFHFLWESAAACPLCSVADYHAIVSSCVAGIQKTTYVWREPKLCSGGISLPEQRVTICKTIDFWLKVGISAGTCTAILLTVLTCYFWKKNQKYMLRYWSVGMDRVGLLIRENI

SEQ ID NO: 142 - protein, 189 aa, Homo sapiens
MAEPGHSHHLSARVRGRTERRIPRLWRLLLWAGTAFQVTQGTGPELHACKESEYHYEYTACDSTGSRWRVAVPHTPGLCTSLPDPVKGTECSFSCNAGEFLDMKDQSCKPCAEGRYSLGTGIRFDEWDELPHGFASLSANMELDDSAAESTGNCTSDEELEAQQGYDLLFVIRFTAGEIEIRTQASTAP

SEQ ID NO: 143 - protein, 504 aa, Homo sapiens
MAEPGHSHHLSARVRGRTERRIPRLWRLLLWAGTAFQVTQGTGPELHACKESEYHYEYTACDSTGSRWRVAVPHTPGLCTSLPDPVKGTECSFSCNAGEFLDMKDQSCKPCAEGRYSLGTGIRFDEWDELPHGFASLSANMELDDSAAESTGNCTSSKWVPRGDYIASNTDECTATLMYAVNLKQSGTVNFEYYYPDSSIIFEFFVQNDQCQPNADDSRWMKTTEKGWEFHSVELNRGNNVLYWRTTAFSVWTKVPKPVLVRNIAITGVAYTSECFPCKPGTYADKQGSSFCKLCPANSYSNKGETSCHQCDPDKYSEKGSSSCNVRPACTDKDYFYTHTACDANGETQLMYKWAKPKICSEDLEGAVKLPASGVKTHCPPCNPGFFKTNNSTCQPCPYGSYSNGSDCTRCPAGTEPAVGFEYKWWNTLPTNMETTVLSGINFEYKGMTGWEVAGDHIYTAAGASDNDFMILTLVVPGFRSLLPIPGMLLSLPSLNTHYSELAR

SEQ ID NO: 144 - protein, 330 aa, Homo sapiens [sequence omitted]

SEQ ID NO: 145 - DNA, 1205 bp, Homo sapiens
ggaggcgctcggggcatccgaggcggggaggcgggtccgccccctattgtgtagcggcgagagtggagccgagcggtgcggagcagatctggtggttctccggagagcagcttccttgggtgttacatgagccaagccctcactgtacagaagagtgagagctgaaacctgttccctgagctgatcagaaggacatcccttggcccctccatctgggctcctgtggataggaggggctgggtgagcaggccagctgggctatggtgtggtgcctcggcctggccgtcctcagcctggtcatcagccagggggctgacggtcgagggaagcctgaggtggtatcggtggtgggccgggctggggagagtgtggtgctgggctgtgacctgctgcccccggccggccggccccccctgcatgtcatcgagtggctgcgctttggattcctgcttcccatcttcatccagttcggcctctactctccccgaattgaccctgattacgtgggtgactgtgggttccctgccttccgagagcttaagagagcagagactgtgtctcctgttttcttcacacgccgctgcatatgggaagatctgaagtcaacaggctttagccctgcaggtggagggaggcctccaggaggtgggcccaggactcaggaggactcagggctgccctgctggcgatcttcctgttctgtaacactacaggtctagcagtccagctgtcacagaaaagctaggacatgcagtatgcttctttggatattctgagtaacatttggactgttacccattggctaccagcatctcccaagtgagaatacatagattacccccagtgccctgaacagcactcggtcctaacacccgtgtccatggaaagcacgccgcgtctggagaaagaagccgaaggctcttgtcacttactagccatgtgattttggaaagaaacttaacattaattccttcagctacaatggaattcttgggaggattaaatatggtgacaacgcctaatattagatggcctgtattccacactcaatcttccttccctcttcttccttctttgtagagctataatgaaaagtatcatgtgggacacagaagaggttgcagtctggggtctgcagggcttagcggccaggcagattagctttcttgaggaatcctgacagtgggtggaagggtatgatgatg

SEQ ID NO: 146 - DNA, 715 bp, Homo sapiens
ggaggcgctcggggcatccgaggcggggaggcgggtccgccccctattgtgtagcggcgagagtggagccgagcggtgcggagcagatctggtggttctccggagagcagcttccttgggtgttacatgagccaagccctcactgtacagaagagtgagagctgaaacctgttccctgagctgatcagaaggacatcccttggcccctccatctgggctcctgtggataggaggggctgggtgagcaggccagctgggctatggtgtggtgcctcggcctggccgtcctcagcctggtcatcagccagggggctgacggtcgagggaagcctgaggtggtatcggtggtgggccgggctggggagagtgtggtgctgggctgtgacctgctgcccccggccggccggccccccctgcatgtcatcgagtggctgcgctttggattcctgcttcccatcttcatccagttcggcctctactctccccgaattgaccctgattacgtgggataagagttctcctcaggtgggaggtagggaggtatcagcaagaaaggtgggctgggtagagtcgcacaaggcctcctatgaacggctttgtccctgctctgatctcatctccagctctgctgccttaactctgcttaataagcatggctgtgctcccaagcagtgttaattcattgaaagatgtcattcatttacacacacacaca

SEQ ID NO: 147 - DNA, 232 bp, Artificial Organism
  Synthetic oligonucleotide
atctggtggttctccggagagcagcttccttgggtgttacatgagccaagccctcactgtacagaagagtgagagctgaaacctgttccctgagctgatcagaaggacatcccttggcccctccatctgggctcctgtggataggaggggctgggtgagcaggccagctgggctatggtgtggtgcctcggcctggccgtcctcagcctggtcatcagccagggggctgacg

SEQ ID NO: 148 - DNA, 189 bp, Artificial Organism
  Synthetic oligonucleotide
gtcgagggaagcctgaggtggtatcggtggtgggccgggctggggagagtgtggtgctgggctgtgacctgctgcccccggccggccggccccccctgcatgtcatcgagtggctgcgctttggattcctgcttcccatcttcatccagttcggcctctactctccccgaattgaccctgattacgtgg

SEQ ID NO: 149 - DNA, 201 bp, Artificial Organism
  Synthetic oligonucleotide
gttctcctcaggtgggaggtagggaggtatcagcaagaaaggtgggctgggtagagtcgcacaaggcctcctatgaacggctttgtccctgctctgatctcatctccagctctgctgccttaactctgcttaataagcatggctgtgctcccaagcagtgttaattcattgaaagatgtcattcatttacacacacacaca

SEQ ID NO: 150 - DNA, 698 bp, Artificial Organism
  Synthetic oligonucleotide
gtgactgtgggttccctgccttccgagagcttaagagagcagagactgtgtctcctgttttcttcacacgccgctgcatatgggaagatctgaagtcaacaggctttagccctgcaggtggagggaggcctccaggaggtgggcccaggactcaggaggactcagggctgccctgctggcgatcttcctgttctgtaacactacaggtctagcagtccagctgtcacagaaaagctaggacatgcagtatgcttctttggatattctgagtaacatttggactgttacccattggctaccagcatctcccaagtgagaatacatagattacccccagtgccctgaacagcactcggtcctaacacccgtgtccatggaaagcacgccgcgtctggagaaagaagccgaaggctcttgtcacttactagccatgtgattttggaaagaaacttaacattaattccttcagctacaatggaattcttgggaggattaaatatggtgacaacgcctaatattagatggcctgtattccacactcaatcttccttccctcttcttccttctttgtagagctataatgaaaagtatcatgtgggacacagaagaggttgcagtctggggtctgcagggcttagcggccaggcagattagctttcttgaggaatcctgacagtgggtggaagggtatgatgatg

SEQ ID NO: 151 - DNA, 86 bp, Artificial Organism
  Synthetic oligonucleotide
ggaggcgctcggggcatccgaggcggggaggcgggtccgccccctattgtgtagcggcgagagtggagccgagcggtgcggagcag

SEQ ID NO: 152 - DNA, 7 bp, Artificial Organism
  Synthetic oligonucleotide
gataaga

SEQ ID NO: 153 - protein, 152 aa, Homo sapiens
MVWCLGLAVLSLVISQGADGRGKPEVVSVVGRAGESVVLGCDLLPPAGRPPLHVIEWLRFGFLLPIFIQFGLYSPRIDPDYVGDCGFPAFRELKRAETVSPVFFTRRCIWEDLKSTGFSPAGGGRPPGGGPRTQEDSGLPCWRSSCSVTLQV

SEQ ID NO: 154 - protein, 83 aa, Homo sapiens
MVWCLGLAVLSLVISQGADGRGKPEVVSVVGRAGESVVLGCDLLPPAGRPPLHVIEWLRFGFLLPIFIQFGLYSPRIDPDYVG

SEQ ID NO: 155 - DNA, 4915 bp, Homo sapiens
tgggaacaaacttcagaaggaggagagacaccgggcccagggcaccctcgcgggcggacccaagcagtgagggcctgcagccggccggccagggcagcggcaggcgcggcccggacctacgggaggaagccccgagccctcggcgggctgcgagcgactccccggcgatgcctcacaactccatcagatctggccatggagggctgaaccagctgggaggggcctttgtgaatggcagacctctgccggaagtggtccgccagcgcatcgtagacctggcccaccagggtgtaaggccctgcgacatctctcgccagctccgcgtcagccatggctgcgtcagcaagatccttggcaggtactacgagactggcagcatccggcctggagtgatagggggctccaagcccaaggtggccacccccaaggtggtggagaagattggggactacaaacgccagaaccctaccatgtttgcctgggagatccgagaccggctcctggctgagggcgtctgtgacaatgacactgtgcccagtgtcagctccattaatagaatcatccggaccaaagtgcagcaaccattcaacctccctatggacagctgcgtggccaccaagtccctgagtcccggacacacgctgatccccagctcagctgtaactcccccggagtcaccccagtcggattccctgggctccacctactccatcaatgggctcctgggcatcgctcagcctggcagcgacaagaggaaaatggatgacagtgatcaggatagctgccgactaagcattgactcacagagcagcagcagcggaccccgaaagcaccttcgcacggatgccttcagccagcaccacctcgagccgctcgagtgcccatttgagcggcagcactacccagaggcctatgcctcccccagccacaccaaaggcgagcaggtgagaagctgggccctgggaggtgaacagggtgggcaagggccagagaaggtctattctccaaatgagcctgtgctccatcaaagcagctggaagttgcatcaatgggctcagggcacctgccttatgcaactccaagcctgacacatgctttattttaccagatgccctggcatcttcctccctttctaaccctcctggcttccttcacccaaaacctttgagcctgggcctttcagggatggcagcacaacctgatgatgctatcccttgccatcagcgtctttcccagattgcaacatcacgttccacaactctgaagcagtagcacaaagccttcacataatgacctcagccactatttcctagccccacctttggccactcatcctgcacaccccatgctcttgcattactcatggccccgagctcaccaccctcgctcacacctctctgcccttgcacactgtgtgccctccacacagaatgcctttcctcccacttctctgcatggaaaaataccactagccttcatgactcagccaaacatcaccctctccgtcagtcctcccctgcccctccgacatgaatcatctctcctgcctcttgcccttctgcatgtcccacatgctgctctcagtagcttctcacagtgtcacttaataatctagcagacagacaggtacaaagacacgcggactccttaaggacagggaagcctcatgaaacgttaaacatcgtttttattcccagcacctaccattgtgccccccttataatagacagtaatggtatagtgaatgaatgaacaaatgaatgagttgagaaatccagaataatacatcacaagctacagcgaatttttcttgctagtgctcaggacaggtgaaatgaatcataacaggttggtgtctgtgaaaagctgacagagatgtgagaggtcccaccctgaggccaacaaagactctgcagctctggcagaaccactaagctctcagctcctagtcatcacatctttttcccttaaccctgccaagtcaaccagatgaggagtgtcttcagggtgggtctgttgcccctctttgcccatgccgtcatttgctgtaggaatgatgccaataatcagcccaaccacttccagtgaccgtctgggctgctggtcccgtgccagcactcgcagctgggcaggcaatctgcatcagcaattttatcagcgttgactgtggcaaccacgagcgtgcagagaaagctgaccatcagcagcatggggagagggcctggggtgctcacgcaccagtcagcacacagctccaggaaggaaaggggttgcagtggggggcctgcaggaagctcactctgtgagagtaagcctgcaaaactcagtgtgcaggcaccagccactcagtgaaagtaaagaaaccctgctgatgagactctggacacccgctgagtcccagagccatttcctggctccatccctaagccccccaaaggaccctgcttgactacagagcacccccatgccatgctggcatatgaacatggggaatcctggaatgagaaagtctttgagctttcagggacctccatgaccaccttgtccagtttctccatttgtgtggagataatccaagcaagacaaggagggcttgggcaatcagaaggttttggagctcaggcctgccaaccctcatttcattcagactggtccactgtcacctgtttcagatatggtgcttctacgtaaacacttatttgaagactgaaaaaaaaagcatttgaaaaccattaaacttctccaaccactcatctttcagatgaggagactgaggtccagcagtgtccataaattattcattacctcctcagtcaatcattattcacccagtcattcacctggagggtggtgaaggcagggagaaccagccagtgcaagggcccctcatgtcctgcctggcctttgcttttcctacctctggtaactgactgtgctgccaaagtaacactccgtgctctctcacctgggcataggaatgccctctggcttggggagccaagaaagaagcacaagtattcatacctgaccttaggacaggttgtaacacagctatcttttctgcaaaatcaacaagtgggggaccaggcatggtggctcacacctgtagtcccagcactttgggaggccaaggtggatgggtcacctgaggtcaggagtttgagaccagcctggccaacaaggcaaaatcccatctctactaaaaatataaaaattagccaggcctggtggcgtgcacctgtaatcctagctactcgggaggctgagacaggagaatcgcttgaagctggggggcggaggttgcagtgacccgagattgtgccactgcactccagcctgggtgacagagcgaggctccatctgaaaaaaaaaaaaaaagggcagggggaagtgttcatcagaaacatcatgtggccttattcctggttgctatttcatgaccagacatagctagaagtcatacagctcttgtttccctattttacaaatgcatcaaaaaaaatcaacagaatatgaatatcagtttattgacagaaatcaagaatttggtggcttctgactcttcacgattctgaaataatatctgtgataactctcattgggcatctgctgtcaccaagtattcggtgctaagcacattatgtataagtatacaaaatttcatgtaatgcttacgtcagcctcataaagtagagtctatgattcccatacaggtgagaaaattaaggttcagagcagtcaagtagactaaagctacttggcaggtcattgcagaaccagggctcagagtcgctgaagttctgaagcattgtgctgctctgccccgattcaagttcaattccagctaaaaagcccaataatcactgggaagtttcagtcattgaatacaaaatcaccaaaagatttgactatataggttttctttttcctttttttctaagttacttggattttgaaatagctataggattctgagtagatattttgctgtcaaaacaacacatccataaagcattttaaacttctcttatacgctctagaaattaggtattttgttcaatttcaataagacacaccctggccaggtgcaacggctcatgcctgtaatcccaacactttgggaggtcaagccaggcagatcatgaggtcaggagtttaagactagcctggccaacatggtgaaactcctgtctctactaaagatacaaaaaattagcctggcatggtagcacgcacctgtaatccctgctactcgggaggctgaggcaggggaatcacttgaacccaggaagcagaggttgcagtaagcgaagatcgcaccattgcactccagcttgggcaacaagagcaaaactccatctacaaaaaaaaaaaaaaaaaaaggccctaagcaactccaccctgcctctaagtgggcccccttggaaggcatggaaccagagcaccatttagtcaataattgctgctatgtgctaatggtgccctggtggcctccagaattgactgcagcttccaaaagtgcccagcatgcaaccggaaagtgctgtggatctttgcagaacccagctcgatggaaatcactgaaaacaattgcctttagtggcactgttatgtaactactgagcattccctgaattcagctttgcacatctcacgtagcaggtatgtgacgagtgtgaaggtatgtggggaatgggtgtgttcttttttctgcgctatctgcttccccagtggaaggaggccatggtgaggatgaggtacacttacctttagttaaacaagttcttttcggaaggagtacctaaggtcatagctgtgctcctgggaaggggaggccaggaggcatctaaaatgaggtcttactgatgaagacccccaggtacttgacaaagagtgtttccaacaaaaacaactc

SEQ ID NO: 156 - DNA, 4964 bp, Homo sapiens
tgggaacaaacttcagaaggaggagagacaccgggcccagggcaccctcgcgggcggacccaagcagtgagggcctgcagccggccggccagggcagcggcaggcgcggcccggacctacgggaggaagccccgagccctcggcgggctgcgagcgactccccggcgatgcctcacaactccatcagatctggccatggagggctgaaccagctgggaggggcctttgtgaatggcagacctctgccggaagtggtccgccagcgcatcgtagacctggcccaccagggtgtaaggccctgcgacatctctcgccagctccgcgtcagccatggctgcgtcagcaagatccttggcagtaggtactacgagactggcagcatccggcctggagtgatagggggctccaagcccaaggtggccacccccaaggtggtggagaagattggggactacaaacgccagaaccctaccatgtttgcctgggagatccgagaccggctcctggctgagggcgtctgtgacaatgacactgtgcccagtgtcagctccattaatagaatcatccggaccaaagtgcagcaaccattcaacctccctatggacagctgcgtggccaccaagtccctgagtcccggacacacgctgatccccagctcagctgtaactcccccggagtcaccccagtcggattccctgggctccacctactccatcaatgggctcctgggcatcgctcagcctggcagcgacaagaggaaaatggatgacagtgatcaggatagctgccgactaagcattgactcacagagcagcagcagcggaccccgaaagcaccttcgcacggatgccttcagccagcaccacctcgagccgctcgagtgcccatttgagcggcagcactacccagaggcctatgcctcccccagccacaccaaaggcgagcaggtgagaagctgggccctgggaggtgaacagggtgggcaagggccagagaaggtctattctccaaatgagcctgtgctccatcaaagcagctggaagttgcatcaatgggctcagggcacctgccttatgcaactccaagcctgacacatgctttattttaccagatgccctggcatcttcctccctttctaaccctcctggcttccttcacccaaaacctttgagcctgggcctttcagggatggcagcacaacctgatgatgctatcccttgccatcagcgtctttcccagattgcaacatcacgttccacaactctgaagcagtagcacaaagccttcacataatgacctcagccactatttcctagccccacctttggccactcatcctgcacaccccatgctcttgcattactcatggccccgagctcaccaccctcgctcacacctctctgcccttgcacactgtgtgccctccacacagaatgcctttcctcccacttctctgcatggaaaaataccactagccttcatgactcagccaaacatcaccctctccgtcagtcctcccctgcccctccgacatgaatcatctctcctgcctcttgcccttctgcatgtcccacatgctgctctcagtagcttctcacagtgtcacttaataatctagcagacagacaggtacaaagacacgcggactccttaaggacagggaagcctcatgaaacgttaaacatcgtttttattcccagcacctaccattgtgccccccttataatagacagtaatggtatagtgaatgaatgaacaaatgaatgagttgagaaatccagaataatacatcacaagctacagcgaatttttcttgctagtgctcaggacaggtgaaatgaatcataacaggttggtgtctgtgaaaagctgacagagatgtgagaggtcccaccctgaggccaacaaagactctgcagctctggcagaaccactaagctctcagctcctagtcatcacatctttttcccttaaccctgccaagtcaaccagatgaggagtgtcttcagggtgggtctgttgcccctctttgcccatgccgtcatttgctgtaggagtgaggcaagtccatatgcctttaagaaccgagtaggacaatggagatgatgccaataatcagcccaaccacttccagtgaccgtctgggctgctggtcccgtgccagcactcgcagctgggcaggcaatctgcatcagcaattttatcagcgttgactgtggcaaccacgagcgtgcagagaaagctgaccatcagcagcatggggagagggcctggggtgctcacgcaccagtcagcacacagctccaggaaggaaaggggttgcagtggggggcctgcaggaagctcactctgtgagagtaagcctgcaaaactcagtgtgcaggcaccagccactcagtgaaagtaaagaaaccctgctgatgagactctggacacccgctgagtcccagagccatttcctggctccatccctaagccccccaaaggaccctgcttgactacagagcacccccatgccatgctggcatatgaacatggggaatcctggaatgagaaagtctttgagctttcagggacctccatgaccaccttgtccagtttctccatttgtgtggagataatccaagcaagacaaggagggcttgggcaatcagaaggttttggagctcaggcctgccaaccctcatttcattcagactggtccactgtcacctgtttcagatatggtgcttctacgtaaacacttatttgaagactgaaaaaaaaagcatttgaaaaccattaaacttctccaaccactcatctttcagatgaggagactgaggtccagcagtgtccataaattattcattacctcctcagtcaatcattattcacccagtcattcacctggagggtggtgaaggcagggagaaccagccagtgcaagggcccctcatgtcctgcctggcctttgcttttcctacctctggtaactgactgtgctgccaaagtaacactccgtgctctctcacctgggcataggaatgccctctggcttggggagccaagaaagaagcacaagtattcatacctgaccttaggacaggttgtaacacagctatcttttctgcaaaatcaacaagtgggggaccaggcatggtggctcacacctgtagtcccagcactttgggaggccaaggtggatgggtcacctgaggtcaggagtttgagaccagcctggccaacaaggcaaaatcccatctctactaaaaatataaaaattagccaggcctggtggcgtgcacctgtaatcctagctactcgggaggctgagacaggagaatcgcttgaagctggggggcggaggttgcagtgacccgagattgtgccactgcactccagcctgggtgacagagcgaggctccatctgaaaaaaaaaaaaaaagggcagggggaagtgttcatcagaaacatcatgtggccttattcctggttgctatttcatgaccagacatagctagaagtcatacagctcttgtttccctattttacaaatgcatcaaaaaaaatcaacagaatatgaatatcagtttattgacagaaatcaagaatttggtggcttctgactcttcacgattctgaaataatatctgtgataactctcattgggcatctgctgtcaccaagtattcggtgctaagcacattatgtataagtatacaaaatttcatgtaatgcttacgtcagcctcataaagtagagtctatgattcccatacaggtgagaaaattaaggttcagagcagtcaagtagactaaagctacttggcaggtcattgcagaaccagggctcagagtcgctgaagttctgaagcattgtgctgctctgccccgattcaagttcaattccagctaaaaagcccaataatcactgggaagtttcagtcattgaatacaaaatcaccaaaagatttgactatataggttttctttttcctttttttctaagttacttggattttgaaatagctataggattctgagtagatattttgctgtcaaaacaacacatccataaagcattttaaacttctcttatacgctctagaaattaggtattttgttcaatttcaataagacacaccctggccaggtgcaacggctcatgcctgtaatcccaacactttgggaggtcaagccaggcagatcatgaggtcaggagtttaagactagcctggccaacatggtgaaactcctgtctctactaaagatacaaaaaattagcctggcatggtagcacgcacctgtaatccctgctactcgggaggctgaggcaggggaatcacttgaacccaggaagcagaggttgcagtaagcgaagatcgcaccattgcactccagcttgggcaacaagagcaaaactccatctacaaaaaaaaaaaaaaaaaaaggccctaagcaactccaccctgcctctaagtgggcccccttggaaggcatggaaccagagcaccatttagtcaataattgctgctatgtgctaatggtgccctggtggcctccagaattgactgcagcttccaaaagtgcccagcatgcaaccggaaagtgctgtggatctttgcagaacccagctcgatggaaatcactgaaaacaattgcctttagtggcactgttatgtaactactgagcattccctgaattcagctttgcacatctcacgtagcaggtatgtgacgagtgtgaaggtatgtggggaatgggtgtgttcttttttctgcgctatctgcttccccagtggaaggaggccatggtgaggatgaggtacacttacctttagttaaacaagttcttttcggaaggagtacctaaggtcatagctgtgctcctgggaaggggaggccaggaggcatctaaaatgaggtcttactgatgaagacccccaggtacttgacaaagagtgtttccaacaaaaacaactc

SEQ ID NO: 157 - DNA, 5242 bp, Homo sapiens
tgggaacaaacttcagaaggaggagagacaccgggcccagggcaccctcgcgggcggacccaagcagtgagggcctgcagccggccggccagggcagcggcaggcgcggcccggacctacgggaggaagccccgagccctcggcgggctgcgagcgactccccggcgatgcctcacaactccatcagatctggccatggagggctgaaccagctgggaggggcctttgtgaatggcagacctctgccggaagtggtccgccagcgcatcgtagacctggcccaccagggtgtaaggccctgcgacatctctcgccagctccgcgtcagccatggctgcgtcagcaagatccttggcaggtactacgagactggcagcatccggcctggagtgatagggggctccaagcccaaggtggccacccccaaggtggtggagaagattggggactacaaacgccagaaccctaccatgtttgcctgggagatccgagaccggctcctggctgagggcgtctgtgacaatgacactgtgcccagtgtcagctccattaatagaatcatccggaccaaagtgcagcaaccattcaacctccctatggacagctgcgtggccaccaagtccctgagtcccggacacacgctgatccccagctcagctgtaactcccccggagtcaccccagtcggattccctgggctccacctactccatcaatgggctcctgggcatcgctcagcctggcagcgacaagaggaaaatggatgacagtgagtgctgggacaggagggcagcgggcggtgcacgagagcagtttgctcaggctttgatggggacagaaacccttccacttatgatatgggactttgtaggggctctgcatgtgactgtcacatgtcctgtccctcagttggccaaggctcctgggcccacgtggctggccctttttctccctccacagtgagtcagcttggagtcagtcctctactttggcctagagcatgaatagataggtcccctaaaagctttcttccttcccggggggtaccaggtgatcaggatagctgccgactaagcattgactcacagagcagcagcagcggaccccgaaagcaccttcgcacggatgccttcagccagcaccacctcgagccgctcgagtgcccatttgagcggcagcactacccagaggcctatgcctcccccagccacaccaaaggcgagcaggtgagaagctgggccctgggaggtgaacagggtgggcaagggccagagaaggtctattctccaaatgagcctgtgctccatcaaagcagctggaagttgcatcaatgggctcagggcacctgccttatgcaactccaagcctgacacatgctttattttaccagatgccctggcatcttcctccctttctaaccctcctggcttccttcacccaaaacctttgagcctgggcctttcagggatggcagcacaacctgatgatgctatcccttgccatcagcgtctttcccagattgcaacatcacgttccacaactctgaagcagtagcacaaagccttcacataatgacctcagccactatttcctagccccacctttggccactcatcctgcacaccccatgctcttgcattactcatggccccgagctcaccaccctcgctcacacctctctgcccttgcacactgtgtgccctccacacagaatgcctttcctcccacttctctgcatggaaaaataccactagccttcatgactcagccaaacatcaccctctccgtcagtcctcccctgcccctccgacatgaatcatctctcctgcctcttgcccttctgcatgtcccacatgctgctctcagtagcttctcacagtgtcacttaataatctagcagacagacaggtacaaagacacgcggactccttaaggacagggaagcctcatgaaacgttaaacatcgtttttattcccagcacctaccattgtgccccccttataatagacagtaatggtatagtgaatgaatgaacaaatgaatgagttgagaaatccagaataatacatcacaagctacagcgaatttttcttgctagtgctcaggacaggtgaaatgaatcataacaggttggtgtctgtgaaaagctgacagagatgtgagaggtcccaccctgaggccaacaaagactctgcagctctggcagaaccactaagctctcagctcctagtcatcacatctttttcccttaaccctgccaagtcaaccagatgaggagtgtcttcagggtgggtctgttgcccctctttgcccatgccgtcatttgctgtaggagtgaggcaagtccatatgcctttaagaaccgagtaggacaatggagatgatgccaataatcagcccaaccacttccagtgaccgtctgggctgctggtcccgtgccagcactcgcagctgggcaggcaatctgcatcagcaattttatcagcgttgactgtggcaaccacgagcgtgcagagaaagctgaccatcagcagcatggggagagggcctggggtgctcacgcaccagtcagcacacagctccaggaaggaaaggggttgcagtggggggcctgcaggaagctcactctgtgagagtaagcctgcaaaactcagtgtgcaggcaccagccactcagtgaaagtaaagaaaccctgctgatgagactctggacacccgctgagtcccagagccatttcctggctccatccctaagccccccaaaggaccctgcttgactacagagcacccccatgccatgctggcatatgaacatggggaatcctggaatgagaaagtctttgagctttcagggacctccatgaccaccttgtccagtttctccatttgtgtggagataatccaagcaagacaaggagggcttgggcaatcagaaggttttggagctcaggcctgccaaccctcatttcattcagactggtccactgtcacctgtttcagatatggtgcttctacgtaaacacttatttgaagactgaaaaaaaaagcatttgaaaaccattaaacttctccaaccactcatctttcagatgaggagactgaggtccagcagtgtccataaattattcattacctcctcagtcaatcattattcacccagtcattcacctggagggtggtgaaggcagggagaaccagccagtgcaagggcccctcatgtcctgcctggcctttgcttttcctacctctggtaactgactgtgctgccaaagtaacactccgtgctctctcacctgggcataggaatgccctctggcttggggagccaagaaagaagcacaagtattcatacctgaccttaggacaggttgtaacacagctatcttttctgcaaaatcaacaagtgggggaccaggcatggtggctcacacctgtagtcccagcactttgggaggccaaggtggatgggtcacctgaggtcaggagtttgagaccagcctggccaacaaggcaaaatcccatctctactaaaaatataaaaattagccaggcctggtggcgtgcacctgtaatcctagctactcgggaggctgagacaggagaatcgcttgaagctggggggcggaggttgcagtgacccgagattgtgccactgcactccagcctgggtgacagagcgaggctccatctgaaaaaaaaaaaaaaagggcagggggaagtgttcatcagaaacatcatgtggccttattcctggttgctatttcatgaccagacatagctagaagtcatacagctcttgtttccctattttacaaatgcatcaaaaaaaatcaacagaatatgaatatcagtttattgacagaaatcaagaatttggtggcttctgactcttcacgattctgaaataatatctgtgataactctcattgggcatctgctgtcaccaagtattcggtgctaagcacattatgtataagtatacaaaatttcatgtaatgcttacgtcagcctcataaagtagagtctatgattcccatacaggtgagaaaattaaggttcagagcagtcaagtagactaaagctacttggcaggtcattgcagaaccagggctcagagtcgctgaagttctgaagcattgtgctgctctgccccgattcaagttcaattccagctaaaaagcccaataatcactgggaagtttcagtcattgaatacaaaatcaccaaaagatttgactatataggttttctttttcctttttttctaagttacttggattttgaaatagctataggattctgagtagatattttgctgtcaaaacaacacatccataaagcattttaaacttctcttatacgctctagaaattaggtattttgttcaatttcaataagacacaccctggccaggtgcaacggctcatgcctgtaatcccaacactttgggaggtcaagccaggcagatcatgaggtcaggagtttaagactagcctggccaacatggtgaaactcctgtctctactaaagatacaaaaaattagcctggcatggtagcacgcacctgtaatccctgctactcgggaggctgaggcaggggaatcacttgaacccaggaagcagaggttgcagtaagcgaagatcgcaccattgcactccagcttgggcaacaagagcaaaactccatctacaaaaaaaaaaaaaaaaaaaggccctaagcaactccaccctgcctctaagtgggcccccttggaaggcatggaaccagagcaccatttagtcaataattgctgctatgtgctaatggtgccctggtggcctccagaattgactgcagcttccaaaagtgcccagcatgcaaccggaaagtgctgtggatctttgcagaacccagctcgatggaaatcactgaaaacaattgcctttagtggcactgttatgtaactactgagcattccctgaattcagctttgcacatctcacgtagcaggtatgtgacgagtgtgaaggtatgtggggaatgggtgtgttcttttttctgcgctatctgcttccccagtggaaggaggccatggtgaggatgaggtacacttacctttagttaaacaagttcttttcggaaggagtacctaaggtcatagctgtgctcctgggaaggggaggccaggaggcatctaaaatgaggtcttactgatgaagacccccaggtacttgacaaagagtgtttccaacaaaaacaactc

SEQ ID NO: 158 - DNA, 2347 bp, Homo sapiens
tgggaacaaacttcagaaggaggagagacaccgggcccagggcaccctcgcgggcggacccaagcagtgagggcctgcagccggccggccagggcagcggcaggcgcggcccggacctacgggaggaagccccgagccctcggcgggctgcgagcgactccccggcgatgcctcacaactccatcagatctggccatggagggctgaaccagctgggaggggcctttgtgaatggcagacctctgccggaagtggtccgccagcgcatcgtagacctggcccaccagggtgtaaggccctgcgacatctctcgccagctccgcgtcagccatggctgcgtcagcaagatccttggcaggtaagcacgaaattcaccgcaggccgccttccccgcagggcttgacttctccagctgatctcagggcagctagagaattcccctcccagggaatggggatttgctcccaatgtccagctttggtcctgagacctgaacagttatggtggtccttctgggcctctacccagccactatttttctactgttttcttgcccttccttctttctttgtccatttatccttcttttagtttctccctctcccttcttctcttttgctccatgtctcattagctataggcttctctcctgctaaggcaagagaatcttcccccaaggtcctcctcctaccgagacctagggaaattaggccactagggaggggacacacagatgagctcccaaggtctaacccctaaaagagtgatatctgagtttgtgcttctcaaaccataattccccaagaccccagatcagtgcttcatagccctggtagcacattacagtcaccaggggaagcctgatttttaaatagcaatactgtttatgccccagggcagaccaattaaatccgaactttagggaaataggcgcaagttttggcatataactccccagcccatccgcccccagcaagtgactctaattctctgcagccagggttgagaaccactgacccaaagattcagaagagaccaggagcagcaaaggcctgcttctgagctgatgcagtcacagattccagtctgcaaagccacttccattaaaaatgcctctgtgccacagcttccagtcagctctgtgtacgtgtgcctgtccccctgctctgacccttaggtggatttaggaggagccctggttggacaaggtaaagggacctggactgttctttgaaccgtgaaaagccctggctcccctcctgaagtagttagggaaaggcatgatcctttgctgggctagggagaggggattcctgtgatgggttgtggtgtcccagaagagatgagtcctggatggaagtaacagatgaatggagttttaaagagctagattctttttcatgcagatgagagcagagagtttctacaacaagaagaggaggatatgctgacacaggcggttgatctgccaaagcaactagttggaggatagagggaggggaagggtggaggccccagaagaggaggctcagcttaacaagttggacctggctggggatccaagcaaggtcaggattccagagtccatgaggagaagcttcaacttgaacctgctaaaacctgatagaaaaccagtgaccaggggggtgagggatatgcctcaggcttggacagggcagggagcaaaggtgaaccagcaagacagagcagagggtccagtgacctcggctagctttctaggtggccaaagaaaatagtcagtcattggctgggcatggtggctgatgcctgtaatcccagcactttgggaggccaaggtgggcggatcacttgaggtcaggggctcaagaccagccaggccaactgagtgaaacctgtctctactaaaaatgcaaaaattagccgggtgtggtggcagacgcttgtaatcccagctactcgggaggctgaggcaggagaatcacctgaacctgggaggcagagtttgaagtgagccaagcttgtcccattgcattctagcctgggtgacagattgagaccctgtctcaaaaaacaaaaaaaaaaaacaaaaaaaacctcagtcgtgctttagccaaaagaagctggatagagcaaactgctgtgcccctgtcattcacacatcaggcacaccaagatttcctttcttagaagggaaatcttttgtgccccatacaatggctgttgcagatgctaggacacaagagactggccagagggaaggaggagagagaagccaaggtgaggcctttagcagagggtgctggtttggcagtagcatgaacctacccaagtgagggaaacagatagttccatgcacatcaagcgt

SEQ ID NO: 159 - DNA, 166 bp, Homo sapiens
gccatggagggctgaaccagctgggaggggcctttgtgaatggcagacctctgccggaagtggtccgccagcgcatcgtagacctggcccaccagggtgtaaggccctgcgacatctctcgccagctccgcgtcagccatggctgcgtcagcaagatccttggcag

SEQ ID NO: 160 - DNA, 1989 bp, Homo sapiens
gtaagcacgaaattcaccgcaggccgccttccccgcagggcttgacttctccagctgatctcagggcagctagagaattcccctcccagggaatggggatttgctcccaatgtccagctttggtcctgagacctgaacagttatggtggtccttctgggcctctacccagccactatttttctactgttttcttgcccttccttctttctttgtccatttatccttcttttagtttctccctctcccttcttctcttttgctccatgtctcattagctataggcttctctcctgctaaggcaagagaatcttcccccaaggtcctcctcctaccgagacctagggaaattaggccactagggaggggacacacagatgagctcccaaggtctaacccctaaaagagtgatatctgagtttgtgcttctcaaaccataattccccaagaccccagatcagtgcttcatagccctggtagcacattacagtcaccaggggaagcctgatttttaaatagcaatactgtttatgccccagggcagaccaattaaatccgaactttagggaaataggcgcaagttttggcatataactccccagcccatccgcccccagcaagtgactctaattctctgcagccagggttgagaaccactgacccaaagattcagaagagaccaggagcagcaaaggcctgcttctgagctgatgcagtcacagattccagtctgcaaagccacttccattaaaaatgcctctgtgccacagcttccagtcagctctgtgtacgtgtgcctgtccccctgctctgacccttaggtggatttaggaggagccctggttggacaaggtaaagggacctggactgttctttgaaccgtgaaaagccctggctcccctcctgaagtagttagggaaaggcatgatcctttgctgggctagggagaggggattcctgtgatgggttgtggtgtcccagaagagatgagtcctggatggaagtaacagatgaatggagttttaaagagctagattctttttcatgcagatgagagcagagagtttctacaacaagaagaggaggatatgctgacacaggcggttgatctgccaaagcaactagttggaggatagagggaggggaagggtggaggccccagaagaggaggctcagcttaacaagttggacctggctggggatccaagcaaggtcaggattccagagtccatgaggagaagcttcaacttgaacctgctaaaacctgatagaaaaccagtgaccaggggggtgagggatatgcctcaggcttggacagggcagggagcaaaggtgaaccagcaagacagagcagagggtccagtgacctcggctagctttctaggtggccaaagaaaatagtcagtcattggctgggcatggtggctgatgcctgtaatcccagcactttgggaggccaaggtgggcggatcacttgaggtcaggggctcaagaccagccaggccaactgagtgaaacctgtctctactaaaaatgcaaaaattagccgggtgtggtggcagacgcttgtaatcccagctactcgggaggctgaggcaggagaatcacctgaacctgggaggcagagtttgaagtgagccaagcttgtcccattgcattctagcctgggtgacagattgagaccctgtctcaaaaaacaaaaaaaaaaaacaaaaaaaacctcagtcgtgctttagccaaaagaagctggatagagcaaactgctgtgcccctgtcattcacacatcaggcacaccaagatttcctttcttagaagggaaatcttttgtgccccatacaatggctgttgcagatgctaggacacaagagactggccagagggaaggaggagagagaagccaaggtgaggcctttagcagagggtgctggtttggcagtagcatgaacctacccaagtgagggaaacagatagttccatgcacatcaagcgt

SEQ ID NO: 161 - DNA, 198 bp, Homo sapiens
gtactacgagactggcagcatccggcctggagtgatagggggctccaagcccaaggtggccacccccaaggtggtggagaagattggggactacaaacgccagaaccctaccatgtttgcctgggagatccgagaccggctcctggctgagggcgtctgtgacaatgacactgtgcccagtgtcagctccattaatag

SEQ ID NO: 162 - DNA, 123 bp, Homo sapiens
tccccagctcagctgtaactcccccggagtcaccccagtcggattccctgggctccacctactccatcaatgggctcctgggcatcgctcagcctggcagcgacaagaggaaaatggatgaca

SEQ ID NO: 163 - DNA, 281 bp, Homo sapiens
gtgagtgctgggacaggagggcagcgggcggtgcacgagagcagtttgctcaggctttgatggggacagaaacccttccacttatgatatgggactttgtaggggctctgcatgtgactgtcacatgtcctgtccctcagttggccaaggctcctgggcccacgtggctggccctttttctccctccacagtgagtcagcttggagtcagtcctctactttggcctagagcatgaatagataggtcccctaaaagctttcttccttcccggggggtaccag

SEQ ID NO: 164 - DNA, 176 bp, Homo sapiens
gtgatcaggatagctgccgactaagcattgactcacagagcagcagcagcggaccccgaaagcaccttcgcacggatgccttcagccagcaccacctcgagccgctcgagtgcccatttgagcggcagcactacccagaggcctatgcctcccccagccacaccaaaggcgagcag

SEQ ID NO: 165 - DNA, 1109 bp, Homo sapiens
gtgagaagctgggccctgggaggtgaacagggtgggcaagggccagagaaggtctattctccaaatgagcctgtgctccatcaaagcagctggaagttgcatcaatgggctcagggcacctgccttatgcaactccaagcctgacacatgctttattttaccagatgccctggcatcttcctccctttctaaccctcctggcttccttcacccaaaacctttgagcctgggcctttcagggatggcagcacaacctgatgatgctatcccttgccatcagcgtctttcccagattgcaacatcacgttccacaactctgaagcagtagcacaaagccttcacataatgacctcagccactatttcctagccccacctttggccactcatcctgcacaccccatgctcttgcattactcatggccccgagctcaccaccctcgctcacacctctctgcccttgcacactgtgtgccctccacacagaatgcctttcctcccacttctctgcatggaaaaataccactagccttcatgactcagccaaacatcaccctctccgtcagtcctcccctgcccctccgacatgaatcatctctcctgcctcttgcccttctgcatgtcccacatgctgctctcagtagcttctcacagtgtcacttaataatctagcagacagacaggtacaaagacacgcggactccttaaggacagggaagcctcatgaaacgttaaacatcgtttttattcccagcacctaccattgtgccccccttataatagacagtaatggtatagtgaatgaatgaacaaatgaatgagttgagaaatccagaataatacatcacaagctacagcgaatttttcttgctagtgctcaggacaggtgaaatgaatcataacaggttggtgtctgtgaaaagctgacagagatgtgagaggtcccaccctgaggccaacaaagactctgcagctctggcagaaccactaagctctcagctcctagtcatcacatctttttcccttaaccctgccaagtcaaccagatgaggagtgtcttcagggtgggtctgttgcccctctttgcccatgccgtcatttgctgtagga

SEQ ID NO: 166 - DNA, 2862 bp, Homo sapiens
atgatgccaataatcagcccaaccacttccagtgaccgtctgggctgctggtcccgtgccagcactcgcagctgggcaggcaatctgcatcagcaattttatcagcgttgactgtggcaaccacgagcgtgcagagaaagctgaccatcagcagcatggggagagggcctggggtgctcacgcaccagtcagcacacagctccaggaaggaaaggggttgcagtggggggcctgcaggaagctcactctgtgagagtaagcctgcaaaactcagtgtgcaggcaccagccactcagtgaaagtaaagaaaccctgctgatgagactctggacacccgctgagtcccagagccatttcctggctccatccctaagccccccaaaggaccctgcttgactacagagcacccccatgccatgctggcatatgaacatggggaatcctggaatgagaaagtctttgagctttcagggacctccatgaccaccttgtccagtttctccatttgtgtggagataatccaagcaagacaaggagggcttgggcaatcagaaggttttggagctcaggcctgccaaccctcatttcattcagactggtccactgtcacctgtttcagatatggtgcttctacgtaaacacttatttgaagactgaaaaaaaaagcatttgaaaaccattaaacttctccaaccactcatctttcagatgaggagactgaggtccagcagtgtccataaattattcattacctcctcagtcaatcattattcacccagtcattcacctggagggtggtgaaggcagggagaaccagccagtgcaagggcccctcatgtcctgcctggcctttgcttttcctacctctggtaactgactgtgctgccaaagtaacactccgtgctctctcacctgggcataggaatgccctctggcttggggagccaagaaagaagcacaagtattcatacctgaccttaggacaggttgtaacacagctatcttttctgcaaaatcaacaagtgggggaccaggcatggtggctcacacctgtagtcccagcactttgggaggccaaggtggatgggtcacctgaggtcaggagtttgagaccagcctggccaacaaggcaaaatcccatctctactaaaaatataaaaattagccaggcctggtggcgtgcacctgtaatcctagctactcgggaggctgagacaggagaatcgcttgaagctggggggcggaggttgcagtgacccgagattgtgccactgcactccagcctgggtgacagagcgaggctccatctgaaaaaaaaaaaaaaagggcagggggaagtgttcatcagaaacatcatgtggccttattcctggttgctatttcatgaccagacatagctagaagtcatacagctcttgtttccctattttacaaatgcatcaaaaaaaatcaacagaatatgaatatcagtttattgacagaaatcaagaatttggtggcttctgactcttcacgattctgaaataatatctgtgataactctcattgggcatctgctgtcaccaagtattcggtgctaagcacattatgtataagtatacaaaatttcatgtaatgcttacgtcagcctcataaagtagagtctatgattcccatacaggtgagaaaattaaggttcagagcagtcaagtagactaaagctacttggcaggtcattgcagaaccagggctcagagtcgctgaagttctgaagcattgtgctgctctgccccgattcaagttcaattccagctaaaaagcccaataatcactgggaagtttcagtcattgaatacaaaatcaccaaaagatttgactatataggttttctttttcctttttttctaagttacttggattttgaaatagctataggattctgagtagatattttgctgtcaaaacaacacatccataaagcattttaaacttctcttatacgctctagaaattaggtattttgttcaatttcaataagacacaccctggccaggtgcaacggctcatgcctgtaatcccaacactttgggaggtcaagccaggcagatcatgaggtcaggagtttaagactagcctggccaacatggtgaaactcctgtctctactaaagatacaaaaaattagcctggcatggtagcacgcacctgtaatccctgctactcgggaggctgaggcaggggaatcacttgaacccaggaagcagaggttgcagtaagcgaagatcgcaccattgcactccagcttgggcaacaagagcaaaactccatctacaaaaaaaaaaaaaaaaaaaggccctaagcaactccaccctgcctctaagtgggcccccttggaaggcatggaaccagagcaccatttagtcaataattgctgctatgtgctaatggtgccctggtggcctccagaattgactgcagcttccaaaagtgcccagcatgcaaccggaaagtgctgtggatctttgcagaacccagctcgatggaaatcactgaaaacaattgcctttagtggcactgttatgtaactactgagcattccctgaattcagctttgcacatctcacgtagcaggtatgtgacgagtgtgaaggtatgtggggaatgggtgtgttcttttttctgcgctatctgcttccccagtggaaggaggccatggtgaggatgaggtacacttacctttagttaaacaagttcttttcggaaggagtacctaaggtcatagctgtgctcctgggaaggggaggccaggaggcatctaaaatgaggtcttactgatgaagacccccaggtacttgacaaagagtgtttccaacaaaaacaactc

SEQ ID NO: 167 - DNA, 92 bp, Homo sapiens
tgggaacaaacttcagaaggaggagagacaccgggcccagggcaccctcgcgggcggacccaagcagtgagggcctgcagccggccggccag

SEQ ID NO: 168 - DNA, 100 bp, Homo sapiens
ggcagcggcaggcgcggcccggacctacgggaggaagccccgagccctcggcgggctgcgagcgactccccggcgatgcctcacaactccatcagatctg

SEQ ID NO: 169 - DNA, 3 bp, Homo sapiens
tag

SEQ ID NO: 170 - DNA, 89 bp, Homo sapiens
aatcatccggaccaaagtgcagcaaccattcaacctccctatggacagctgcgtggccaccaagtccctgagtcccggacacacgctga

SEQ ID NO: 171 - DNA, 46 bp, Homo sapiens
gtgaggcaagtccatatgcctttaagaaccgagtaggacaatggag

SEQ ID NO: 172 - protein, 450 aa, Homo sapiens
MPHNSIRSGHGGLNQLGGAFVNGRPLPEVVRQRIVDLAHQGVRPCDISRQLRVSHGCVSKILGRYYETGSIRPGVIGGSKPKVATPKVVEKIGDYKRQNPTMFAWEIRDRLLAEGVCDNDTVPSVSSINRIIRTKVQQPFNLPMDSCVATKSLSPGHTLIPSSAVTPPESPQSDSLGSTYSINGLLGIAQPGSDKRKMDDSDQDSCRLSIDSQSSSSGPRKHLRTDAFSQHHLEPLECPFERQHYPEAYASPSHTKGEQGLYPLPLLNSTLDDGKATLTPSNTPLGRNLSTHQTYPVVADPHSPFAIKQETPEVSSSSSTPSSLSSSAFLDLQQVGSGVPPFNAFPHAASVYGQFTGQALLSGREMVGPTLPGYPPHIPTSGQGSYASSAIAGMVAGSEYSGNAYGHTPYSSYSEAWGFPNSSLLSSPYYYSSTSRPSAPPTTATAFDHL

SEQ ID NO: 173 - protein, 398 aa, Homo sapiens
MPHNSIRSGHGGLNQLGGAFVNGRPLPEVVRQRIVDLAHQGVRPCDISRQLRVSHGCVSKILGRYYETGSIRPGVIGGSKPKVATPKVVEKIGDYKRQNPTMFAWEIRDRLLAEGVCDNDTVPSVSSINRIIRTKVQQPFNLPMDSCVATKSLSPGHTLIPSSAVTPPESPQSDSLGSTYSINGLLGIAQPGSDKRKMDDSDQDSCRLSIDSQSSSSGPRKHLRTDAFSQHHLEPLECPFERQHYPEAYASPSHTKGEQGLYPLPLLNSTLDDGKATLTPSNTPLGRNLSTHQTYPVVAAPPFWICSKSAPGSRPSMPFPMLPPCTGSSRARPSSQGERWWGPRCPDTHPTSPPADRAAMPPLPSQAWWQEVNTLAMPMATPPTPPTARPGASPTPAC

SEQ ID NO: 174 - protein, 60 aa, Homo sapiens [sequence omitted]

SEQ ID NO: 175 - protein, 387 aa, Homo sapiens
MPHNSIRSGHGGLNQLGGAFVNGRPLPEVVRQRIVDLAHQGVRPCDISRQLRVSHGCVSKILGRYYETGSIRPGVIGGSKPKVATPKVVEKIGDYKRQNPTMFAWEIRDRLLAEGVCDNDTVPSVSSINRIIRTKVQQPFNLPMDSCVATKSLSPGHTLIPSSAVTPPESPQSDSLGSTYSINGLLGIAQPGSDKRKMDDSDQDSCRLSIDSQSSSSGPRKHLRTDAFSQHHLEPLECPFERQHYPEAYASPSHTKGEQGLYPLPLLNSTLDDGKATLTPSNTPLGRNLSTHQTYPVVAGREMVGPTLPGYPPHIPTSGQGSYASSAIAGMVAGSEYSGNAYGHTPYSSYSEAWGFPNSSLLSSPYYYSSTSRPSAPPTTATAFDHL

SEQ ID NO: 176 - protein, 321 aa, Homo sapiens
MPHNSIRSGHGGLNQLGGAFVNGRPLPEVVRQRIVDLAHQGVRPCDISRQLRVSHGCVSKILGRYYETGSIRPGVIGGSKPKVATPKVVEKIGDYKRQNPTMFAWEIRDRLLAEGVCDNDTVPSVSSINRIIRTKVQQPFNLPMDSCVATKSLSPGHTLIPSSAVTPPESPQSDSLGSTYSINGLLGIAQPGSDKRKMDDSDQDSCRLSIDSQSSSSGPRKHLRTDAFSQHHLEPLECPFERQHYPEAYASPSHTKGEQGERWWGPRCPDTHPTSPPADRAAMPPLPSQAWWQEVNTLAMPMATPPTPPTARPGASPTPAC

SEQ ID NO: 177 - protein, 450 aa, Homo sapiens
MPHNSIRSGHGGLNQLGGAFVNGRPLPEVVRQRIVDLAHQGVRPCDISRQLRVSHGCVSKILGRYYETGSIRPGVIGGSKPKVATPKVVEKIGDYKRQNPTMFAWEIRDRLLAEGVCDNDTVPSVSSINRIIRTKVQQPFNLPMDSCVATKSLSPGHTLIPSSAVTPPESPQSDSLGSTYSINGLLGIAQPGSDKRKMDDSDQDSCRLSIDSQSSSSGPRKHLRTDAFSQHHLEPLECPFERQHYPEAYASPSHTKGEQGLYPLPLLNSTLDDGKATLTPSNTPLGRNLSTHQTYPVVADPHSPFAIKQETPEVSSSSSTPSSLSSSAFLDLQQVGSGVPPFNAFPHAASVYGQFTGQALLSGREMVGPTLPGYPPHIPTSGQGSYASSAIAGMVAGSEYSGNAYGHTPYSSYSEAWRFPNSSLLSSPYYYSSTSRPSAPPTTATAFDHL

SEQ ID NO: 178 - protein, 287 aa, Homo sapiens
MPHNSIRSGHGGLNQLGGAFVNGRPLPEVVRQRIVDLAHQGVRPCDISRQLRVSHGCVSKILGRYYETGSIRPGVIGGSKPKVATPKVVEKIGDYKRQNPTMFAWEIRDRLLAEGVCDNDTVPSVSSINRIIRTKVQQPFNLPMDSCVATKSLSPGHTLIPSSAVTPPESPQSDSLGSTYSINGLLGIAQPGSDKRKMDDSDQDSCRLSIDSQSSSSGPRKHLRTDAFSQHHLEPLECPFERQHYPEAYASPSHTKGEQEVNTLAMPMATPPTPPTARPGASPTPAC

SEQ ID NO: 179 - protein, 387 aa, Homo sapiens
MPHNSIRSGHGGLNQLGGAFVNGRPLPEVVRQRIVDLAHQGVRPCDISRQLRVSHGCVSKILGRYYETGSIRPGVIGGSKPKVATPKVVEKIGDYKRQNPTMFAWEIRDRLLAEGVCDNDTVPSVSSINRIIRTKVQQPFNLPMDSCVATKSLSPGHTLIPSSAVTPPESPQSDSLGSTYSINGLLGIAQPGSDKRKMDDSDQDSCRLSIDSQSSSSGPRKHLRTDAFSQHHLEPLECPFERQHYPEAYASPSHTKGEQGLYPLPLLNSTLDDGKATLTPSNTPLGRNLSTHQTYPVVAGREMVGPTLPGYPPHIPTSGQGSYASSAIAGMVAGSEYSGNAYGHTPYSSYSEAWRFPNSSLLSSPYYYSSTSRPSAPPTTATAFDHL

SEQ ID NO: 180 - protein, 321 aa, Homo sapiens; identical to SEQ ID NO: 176

SEQ ID NO: 181 - protein, 287 aa, Homo sapiens; identical to SEQ ID NO: 178

SEQ ID NO: 182 - protein, 450 aa, Homo sapiens; identical to SEQ ID NO: 177

SEQ ID NO: 183 - protein, 264 aa, Homo sapiens
MPHNSIRSGHGGLNQLGGAFVNGRPLPEVVRQRIVDLAHQGVRPCDISRQLRVSHGCVSKILGRYYETGSIRPGVIGGSKPKVATPKVVEKIGDYKRQNPTMFAWEIRDRLLAEGVCDNDTVPSVSSINRIIRTKVQQPFNLPMDSCVATKSLSPGHTLIPSSAVTPPESPQSDSLGSTYSINGLLGIAQPGSDKRKMDDSECWDRRAAGGAREQFAQALMGTETLPLMIWDFVGALHVTVTCPVPQLAKAPGPTWLALFLPPQ

SEQ ID NO: 184 - protein, 306 aa, Homo sapiens
MPHNSIRSGHGGLNQLGGAFVNGRPLPEVVRQRIVDLAHQGVRPCDISRQLRVSHGCVSKILGRYYETGSIRPGVIGGSKPKVATPKVVEKIGDYKRQNPTMFAWEIRDRLLAEGVCDNDTVPSVSSINRIIRTKVQQPFNLPMDSCVATKSLSPGHTLIPSSAVTPPESPQSDSLGSTYSINGLLGIAQPGSDKRKMDDSDQDSCRLSIDSQSSSSGPRKHLRTDAFSQHHLEPLECPFERQHYPEAYASPSHTKGEQVRSWALGGEQGGQGPEKVYSPNEPVLHQSSWKLHQWAQGTCLMQLQA

SEQ ID NO: 185 - protein, 307 aa, Homo sapiens
MPHNSIRSGHGGLNQLGGAFVNGRPLPEVVRQRIVDLAHQGVRPCDISRQLRVSHGCVSKILGSRYYETGSIRPGVIGGSKPKVATPKVVEKIGDYKRQNPTMFAWEIRDRLLAEGVCDNDTVPSVSSINRIIRTKVQQPFNLPMDSCVATKSLSPGHTLIPSSAVTPPESPQSDSLGSTYSINGLLGIAQPGSDKRKMDDSDQDSCRLSIDSQSSSSGPRKHLRTDAFSQHHLEPLECPFERQHYPEAYASPSHTKGEQVRSWALGGEQGGQGPEKVYSPNEPVLHQSSWKLHQWAQGTCLMQLQA

SEQ ID NO: 186 - protein, 64 aa, Homo sapiens
MPHNSIRSGHGGLNQLGGAFVNGRPLPEVVRQRIVDLAHQGVRPCDISRQLRVSHGCVSKILGR

SEQ ID NO: 187 - DNA, 805 bp, Homo sapiens
gtgaaactcacccagctttagtaaccaactcgattgcatagactttagataaccatgtgaaggggattctaccatcagaaaagaggccaaacttctatcatcatggtggatgtgaagtgtctgagtgactgtaaattgcagaaccaacttgagaagcttggattttcacctggcccaatactacagcttaatatcattttgcaaggaaatatcatactctcaacagaaaaaagcaagaaactcaaaaaatggcctgaggcttccaccactaaacgcaaagctgtagatacctattgcttggattataagccttccaagggaagaaggtgggctgcaagagcaccaagcaccagaatcacatatgggactatcaccaaagagagagactactgcgcggaagaccagactatcgagagctggagagaagaaggtttcccagtgggcttgaagcttgctgtgcttggtattttcatcattgtggtgtttgtctacctgactgtggaaaataagtcgctgtttggttaagtaatttaggagcaaagcaatgctccaagcgaggcctcctgcttcaggaaagaaccaaaacactaccctgaagggccagcctagcctgcagccctcccttgcagggagccttcccttgcactgtgctgctctcacagatcggtgtctgggctcagccaggtggaaggaacctgcctaaccaggcacctgtgttaagagcatgatggttaggaaatcccccaagtcatgtcaactctcattaaaggtgcttccatatttgagcaggcgtcaaacaaggaaa

SEQ ID NO: 188 - DNA, 946 bp, Homo sapiens
gctgcctggaaggcaggaagtggctctgcggggaattgtgaggcggactgcgagggaaagggggccttgttgagtccgccaggattctaccatcagaaaagaggccaaacttctatcatcatggtggatgtgaagtgtctgagtgactgtaaattgcagaaccaacttgagaagcttggattttcacctggcccaatactaccttccaccagaaagttgtatgaaaaaaagttagtacagttgttggtctcacctccctgtgcaccacctgtgatgaatggacccagagagctggatggagcgcaggacagtgatgacagcgaagagcttaatatcattttgcaaggaaatatcatactctcaacagaaaaaagcaagaaactcaaaaaatggcctgaggcttccaccactaaacgcaaagctgtagatacctattgcttggattataagccttccaagggaagaaggtgggctgcaagagcaccaagcaccagaatcacatatgggactatcaccaaagagagagactactgcgcggaagaccagactatcgagagctggagagaagaaggtttcccagtgggcttgaagcttgctgtgcttggtattttcatcattgtggtgtttgtctacctgactgtggaaaataagtcgctgtttggttaagtaatttaggagcaaagcaatgctccaagcgaggcctcctgcttcaggaaagaaccaaaacactaccctgaagggccagcctagcctgcagccctcccttgcagggagccttcccttgcactgtgctgctctcacagatcggtgtctgggctcagccaggtggaaggaacctgcctaaccaggcacctgtgttaagagcatgatggttaggaaatcccccaagtcatgtcaactctcattaaaggtgcttccatatttgagcaggcgtcaaacaaggaaa

SEQ ID NO: 189 - DNA, 804 bp, Homo sapiens
gctgcctggaaggcaggaagtggctctgcggggaattgtgaggcggactgcgagggaaagggggccttgttgagtccgccaggattctaccatcagaaaagaggccaaacttctatcatcatggtggatgtgaagtgtctgagtgactgtaaattgcagaaccaacttgagaagcttggattttcacctggcccaatactaccttccaccagaaagttgtatgaaaaaaagttagtacagttgttggtctcacctccctgtgcaccacctgtgatgaatggacccagagagctggatggagcgcaggacagtgatgacagcgaaggtgggctgcaagagcaccaagcaccagaatcacatatgggactatcaccaaagagagagactactgcgcggaagaccagactatcgagagctggagagaagaaggtttcccagtgggcttgaagcttgctgtgcttggtattttcatcattgtggtgtttgtctacctgactgtggaaaataagtcgctgtttggttaagtaatttaggagcaaagcaatgctccaagcgaggcctcctgcttcaggaaagaaccaaaacactaccctgaagggccagcctagcctgcagccctcccttgcagggagccttcccttgcactgtgctgctctcacagatcggtgtctgggctcagccaggtggaaggaacctgcctaaccaggcacctgtgttaagagcatgatggttaggaaatcccccaagtcatgtcaactctcattaaaggtgcttccatatttgagcaggcgtcaaacaaggaaa

SEQ ID NO: 190 - DNA, 3174 bp, Homo sapiens
ggggcttcttgtctcaggttgaaacctttttatcagaatgtcatttccttctctgctcccagggaagggctttttgcatgtagcatatgggttcatagaaatatatagggagattgttatttttaggaaaaaaaaagagcaataattaactaactgaaatacacatgaagtgttagagtgggatgcaaggagcactgagctgggagccaggtctcctggcttctagccctgcttggaaactaatgacctatgtgaccttagactagtcatgtcttatttctgagactcaggttcctcaactataaataggggattacataaatttcctcttaagtctcctttggagtccagggctctgtgagtctgggaagttgagcctcagtggggcatagggttgtggaaccagagggtcgcaggtttcctctgccctcacagatgcactccgtgcagacaacagacatatctggagggtggatggaagtggtatggtggctctgagaagtgagagggggagtgagagggaaaggcaagtcacccagagcttctgctagaatcttcccctagccagggcccaggactccttgcagttctgcctctcttccctcctacagccaggcccaaggggagtaagtcagttggcctagactctgactccaggtcctgtctaggccatcacaggcgccactcttatgtacgttctcactttctctctgtcacatacacacagcatcaccaccaccaccaccacaaccacctgcagatagatgctcaagtgattctagaagagatctcaaggactggcgctctgctccagttatgtaacccatgggcttccctttgcacagctcctcatgtgctcatctccatgctgatcaaaccaccccacctcattccttgccttctgcaaggggaagtgcctcaggctggagtttgtcctgtctacagactgaatatgcattttgcccagtggctggagatgtgctggtggtggaatgtgctggtgattgtttctggatggagagccacagccccccagtgttctgccatgactgactcctgaccttggcaaattgcctcctctctcccagcctcctccataacaggtggcgatgagtcccatttcctccctacctcacaggaaggcacgcattataaagggcacacttatcagatgtgcccagatgtggctggaacttttggagacagatacttggttcacaaccgcaaaggtgggctttcaccagagaagaaaatctctgggctgctgagttcagtgggctccttgcaggctggtccaggaagtctggtgttcctcctgaaggtggctgctatgtccagcaggtgatcaagctgacagtaccacaagaaccaagaaacagaatctgttcccaaggaatgaatgttctatctctctgacccaaaagcaagagcaagagagagctgtcaccatcatcaccctgctcccaacacaaacacagccccccaagtccatattgctgacaagggtatctgccttgtcagggtgaatcctctggacccccaggccatccctggagtggtcagtgcccactgtgccggggttattgtggccagtccgcctgggttcgcttctctaaatttccatgggataggaactatagatcatgaagaagaaacaggaaccttgactcttcacggaggagcccaggaggtcagaaccatccaccaggagggtgagcggtagctgcccagggcatccctggaggaagtcgtcatactgaggaagaaattgccaaagccaagagctcccagacctgggcagctcaggagctgacagaaaccaccccccaagtctggagttcaagggttttcctcgtgggctgctggtctgtctctttcccttctggggcagccgtctctcctccttcagctcattcccgtgttccatctgaggggcgggaggaaggcaggagggggagatggcaggacccagacagatcctcaggactctcccagcctctgttgccatggcaacactgctatttttatcccgttgttcatgatgctcaaagctctaactttctctgttccagagaggccaggctggtttctgccctcatcctttaacacagcatcttctcccagaggcctgaggatgggaaaaagtgatggagaaaaggggaacccctaaggtcacccctcagccagggggaactgtttaacaggggtttgtctctgcccttttgagcctttggttttctacctggctcaggcacccaggtttatgttttctagatcaaaactctgcatggtctccctgagagactggagaagagctgccaatcaggatggattttttcctacacaggtatgacactgcagccacttcccttcttgggaaaattaaacttcattctgaagaatgtcctgttggtggtataagccaacccctgccctcctaaaaggggatagataattaaatttggttaattagcaatcagattcactggggaattgaaacccgtacttccctttcttctgtccctccaccaaagaaccggaacaaatggcttcatgtctttgtccagtctttctgcctaaagcaaaatagcatatattctccaggctgaaaagtagattcctcctcacccctactcaagacggccacatttcaatccaggctcttgaagacagggtctaatgaaaggatttctgttctttctctgtctgttccctctggcccagcttctagtcctctccttatgtccccacctccatggcagtggcaagagacccctgagagtcaatggtgctaacgttccccacctatatacccctatgtagtttatcgagatttgaacccagcacctgggtggctgtgttgggcggatacatttcacgtcctcaagaccacaaccctggcgacaggtctggattaattctgtaaagtagcaatctatatcatgctaaattcctgcactgaggttctacctcggctgaactgactcgtggatggttaagtttcctggggtggctggaacccatttactaagcctctaattggtttcattttggctcaagttgcatggtttcccgaatctatgcacctggagtaagcacttttctggttgccactgaaaagcatgccggcaaacgctgctctgttaattgctgtaataaacagactttattata

SEQ ID NO: 191 - DNA, 2411 bp, Homo sapiens
gctgcctggaaggcaggaagtggctctgcggggaattgtgaggcggactgcgagggaaagggggccttgttgagtccgccagctcctcatgtgctcatctccatgctgatcaaaccaccccacctcattccttgccttctgcaaggggaagtgcctcaggctggagtttgtcctgtctacagactgaatatgcattttgcccagtggctggagatgtgctggtggtggaatgtgctggtgattgtttctggatggagagccacagccccccagtgttctgccatgactgactcctgaccttggcaaattgcctcctctctcccagcctcctccataacaggtggcgatgagtcccatttcctccctacctcacaggaaggcacgcattataaagggcacacttatcagatgtgcccagatgtggctggaacttttggagacagatacttggttcacaaccgcaaaggtgggctttcaccagagaagaaaatctctgggctgctgagttcagtgggctccttgcaggctggtccaggaagtctggtgttcctcctgaaggtggctgctatgtccagcaggtgatcaagctgacagtaccacaagaaccaagaaacagaatctgttcccaaggaatgaatgttctatctctctgacccaaaagcaagagcaagagagagctgtcaccatcatcaccctgctcccaacacaaacacagccccccaagtccatattgctgacaagggtatctgccttgtcagggtgaatcctctggacccccaggccatccctggagtggtcagtgcccactgtgccggggttattgtggccagtccgcctgggttcgcttctctaaatttccatgggataggaactatagatcatgaagaagaaacaggaaccttgactcttcacggaggagcccaggaggtcagaaccatccaccaggagggtgagcggtagctgcccagggcatccctggaggaagtcgtcatactgaggaagaaattgccaaagccaagagctcccagacctgggcagctcaggagctgacagaaaccaccccccaagtctggagttcaagggttttcctcgtgggctgctggtctgtctctttcccttctggggcagccgtctctcctccttcagctcattcccgtgttccatctgaggggcgggaggaaggcaggagggggagatggcaggacccagacagatcctcaggactctcccagcctctgttgccatggcaacactgctatttttatcccgttgttcatgatgctcaaagctctaactttctctgttccagagaggccaggctggtttctgccctcatcctttaacacagcatcttctcccagaggcctgaggatgggaaaaagtgatggagaaaaggggaacccctaaggtcacccctcagccagggggaactgtttaacaggggtttgtctctgcccttttgagcctttggttttctacctggctcaggcacccaggtttatgttttctagatcaaaactctgcatggtctccctgagagactggagaagagctgccaatcaggatggattttttcctacacaggtatgacactgcagccacttcccttcttgggaaaattaaacttcattctgaagaatgtcctgttggtggtataagccaacccctgccctcctaaaaggggatagataattaaatttggttaattagcaatcagattcactggggaattgaaacccgtacttccctttcttctgtccctccaccaaagaaccggaacaaatggcttcatgtctttgtccagtctttctgcctaaagcaaaatagcatatattctccaggctgaaaagtagattcctcctcacccctactcaagacggccacatttcaatccaggctcttgaagacagggtctaatgaaaggatttctgttctttctctgtctgttccctctggcccagcttctagtcctctccttatgtccccacctccatggcagtggcaagagacccctgagagtcaatggtgctaacgttccccacctatatacccctatgtagtttatcgagatttgaacccagcacctgggtggctgtgttgggcggatacatttcacgtcctcaagaccacaaccctggcgacaggtctggattaattctgtaaagtagcaatctatatcatgctaaattcctgcactgaggttctacctcggctgaactgactcgtggatggttaagtttcctggggtggctggaacccatttactaagcctctaattggtttcattttggctcaagttgcatggtttcccgaatctatgcacctggagtaagcacttttctggttgccactgaaaagcatgccggcaaacgctgctctgttaattgctgtaataaacagactttattata

SEQ ID NO: 192 - DNA, 1225 bp, Homo sapiens
gctgcctggaaggcaggaagtggctctgcggggaattgtgaggcggactgcgagggaaagggggccttgttgagtccgccagatctctggtgagtgttcccccagcctggcgtagggcatgccccagttcactttcgcctgcttctgtggtctccacggcttctgcaaaatgaagaggaagaaggaggaagttcacagagagcgggagacggcggtgtgatcagaaccagggcccctccatcaagcccccagcaggtcccaggcctgatggtgcctgcttctggctggggcttggagcaggaagccgtgtgtgtatcttaagtcttgatttagccagtgctcttctcagcctgactctcacccgagggcatcagcctcctgtgtgcctctcatcctcctcatgcccacacccattagcttccaattctcagacctccttggagagaggccccagccacacaagggggaaccccaggacctgccgcatgccttccagagactgagaagccccagggaggccaaggagtgaaacttctttcctgccctgagagcttcgggggactcttctcagggtaaccgcatgaggcatgtgccgccttgggctaggagagctgttgctaaatgggaaactggctgctctagcagagaacttccagcggccctgaccctggagaaggcctccagggcggaagtgtgagactctcctgggattccaggacctggggcaagaatccttttccagccccctgccagcatcctcctgggccaggtggggccaggcctgaggtggccagcccagtgaggaggaaggcagaggtggccagtggctccgtggctccctctgttcttgctctccagaaagcagtgtttcctccagccccggccctgacccacccgtgttcatgatgcctgtgcctccttgccagcatcacagatgtggggaggcctgttccccaggccctgactcccctcctcagggactgtcttgccgtggccagactgagggacccctttcctggactgagccgtgccctccctcgattctcctgtctcccctgcctttttcttctctcctcagaagccatagaggggactgcgttcgtatgtggtgccttcggtggaaactcttagggtagggggacctctaggaccttcctcgactttttccctcatcccccacccccgccaaccttccagcttcagcctctgcccttacccccagccc

SEQ ID NO: 193 - DNA, 1209 bp, Homo sapiens
cccaaatccggtctcctaagccgcagctgcttcccttcgcagtgatgaatggctcagggagggaagatctctggtgagtgttcccccagcctggcgtagggcatgccccagttcactttcgcctgcttctgtggtctccacggcttctgcaaaatgaagaggaagaaggaggaagttcacagagagcgggagacggcggtgtgatcagaaccagggcccctccatcaagcccccagcaggtcccaggcctgatggtgcctgcttctggctggggcttggagcaggaagccgtgtgtgtatcttaagtcttgatttagccagtgctcttctcagcctgactctcacccgagggcatcagcctcctgtgtgcctctcatcctcctcatgcccacacccattagcttccaattctcagacctccttggagagaggccccagccacacaagggggaaccccaggacctgccgcatgccttccagagactgagaagccccagggaggccaaggagtgaaacttctttcctgccctgagagcttcgggggactcttctcagggtaaccgcatgaggcatgtgccgccttgggctaggagagctgttgctaaatgggaaactggctgctctagcagagaacttccagcggccctgaccctggagaaggcctccagggcggaagtgtgagactctcctgggattccaggacctggggcaagaatccttttccagccccctgccagcatcctcctgggccaggtggggccaggcctgaggtggccagcccagtgaggaggaaggcagaggtggccagtggctccgtggctccctctgttcttgctctccagaaagcagtgtttcctccagccccggccctgacccacccgtgttcatgatgcctgtgcctccttgccagcatcacagatgtggggaggcctgttccccaggccctgactcccctcctcagggactgtcttgccgtggccagactgagggacccctttcctggactgagccgtgccctccctcgattctcctgtctcccctgcctttttcttctctcctcagaagccatagaggggactgcgttcgtatgtggtgccttcggtggaaactcttagggtagggggacctctaggaccttcctcgactttttccctcatcccccacccccgccaaccttccagcttcagcctctgcccttacccccagccc

SEQ ID NO: 194 - DNA, 1143 bp, Homo sapiens
atctctggtgagtgttcccccagcctggcgtagggcatgccccagttcactttcgcctgcttctgtggtctccacggcttctgcaaaatgaagaggaagaaggaggaagttcacagagagcgggagacggcggtgtgatcagaaccagggcccctccatcaagcccccagcaggtcccaggcctgatggtgcctgcttctggctggggcttggagcaggaagccgtgtgtgtatcttaagtcttgatttagccagtgctcttctcagcctgactctcacccgagggcatcagcctcctgtgtgcctctcatcctcctcatgcccacacccattagcttccaattctcagacctccttggagagaggccccagccacacaagggggaaccccaggacctgccgcatgccttccagagactgagaagccccagggaggccaaggagtgaaacttctttcctgccctgagagcttcgggggactcttctcagggtaaccgcatgaggcatgtgccgccttgggctaggagagctgttgctaaatgggaaactggctgctctagcagagaacttccagcggccctgaccctggagaaggcctccagggcggaagtgtgagactctcctgggattccaggacctggggcaagaatccttttccagccccctgccagcatcctcctgggccaggtggggccaggcctgaggtggccagcccagtgaggaggaaggcagaggtggccagtggctccgtggctccctctgttcttgctctccagaaagcagtgtttcctccagccccggccctgacccacccgtgttcatgatgcctgtgcctccttgccagcatcacagatgtggggaggcctgttccccaggccctgactcccctcctcagggactgtcttgccgtggccagactgagggacccctttcctggactgagccgtgccctccctcgattctcctgtctcccctgcctttttcttctctcctcagaagccatagaggggactgcgttcgtatgtggtgccttcggtggaaactcttagggtagggggacctctaggaccttcctcgactttttccctcatcccccacccccgccaaccttccagcttcagcctctgcccttacccccagccc

SEQ ID NO: 195 - DNA, 845 bp, Homo sapiens
ggggcttcttgtctcaggttgaaacctttttatcagaatgtcatttccttctctgctcccagggaagggctttttgcatgtagcatatgggttcatagaaatatatagggagattgttatttttaggaaaaaaaaagagcaataattaactaactgaaatacacatgaagtgttagagtgggatgcaaggagcactgagctgggagccaggtctcctggcttctagccctgcttggaaactaatgacctatgtgaccttagactagtcatgtcttatttctgagactcaggttcctcaactataaataggggattacataaatttcctcttaagtctcctttggagtccagggctctgtgagtctgggaagttgagcctcagtggggcatagggttgtggaaccagagggtcgcaggtttcctctgccctcacagatgcactccgtgcagacaacagacatatctggagggtggatggaagtggtatggtggctctgagaagtgagagggggagtgagagggaaaggcaagtcacccagagcttctgctagaatcttcccctagccagggcccaggactccttgcagttctgcctctcttccctcctacagccaggcccaaggggagtaagtcagttggcctagactctgactccaggtcctgtctaggccatcacaggcgccactcttatgtacgttctcactttctctctgtcacatacacacagcatcaccaccaccaccaccacaaccacctgcagatagatgctcaagtgattctagaagagatctcaaggactggcgctctgctccagttatgtaacccatgggcttccctttgcacag

SEQ ID NO: 196 - DNA, 2329 bp, Homo sapiens
ctcctcatgtgctcatctccatgctgatcaaaccaccccacctcattccttgccttctgcaaggggaagtgcctcaggctggagtttgtcctgtctacagactgaatatgcattttgcccagtggctggagatgtgctggtggtggaatgtgctggtgattgtttctggatggagagccacagccccccagtgttctgccatgactgactcctgaccttggcaaattgcctcctctctcccagcctcctccataacaggtggcgatgagtcccatttcctccctacctcacaggaaggcacgcattataaagggcacacttatcagatgtgcccagatgtggctggaacttttggagacagatacttggttcacaaccgcaaaggtgggctttcaccagagaagaaaatctctgggctgctgagttcagtgggctccttgcaggctggtccaggaagtctggtgttcctcctgaaggtggctgctatgtccagcaggtgatcaagctgacagtaccacaagaaccaagaaacagaatctgttcccaaggaatgaatgttctatctctctgacccaaaagcaagagcaagagagagctgtcaccatcatcaccctgctcccaacacaaacacagccccccaagtccatattgctgacaagggtatctgccttgtcagggtgaatcctctggacccccaggccatccctggagtggtcagtgcccactgtgccggggttattgtggccagtccgcctgggttcgcttctctaaatttccatgggataggaactatagatcatgaagaagaaacaggaaccttgactcttcacggaggagcccaggaggtcagaaccatccaccaggagggtgagcggtagctgcccagggcatccctggaggaagtcgtcatactgaggaagaaattgccaaagccaagagctcccagacctgggcagctcaggagctgacagaaaccaccccccaagtctggagttcaagggttttcctcgtgggctgctggtctgtctctttcccttctggggcagccgtctctcctccttcagctcattcccgtgttccatctgaggggcgggaggaaggcaggagggggagatggcaggacccagacagatcctcaggactctcccagcctctgttgccatggcaacactgctatttttatcccgttgttcatgatgctcaaagctctaactttctctgttccagagaggccaggctggtttctgccctcatcctttaacacagcatcttctcccagaggcctgaggatgggaaaaagtgatggagaaaaggggaacccctaaggtcacccctcagccagggggaactgtttaacaggggtttgtctctgcccttttgagcctttggttttctacctggctcaggcacccaggtttatgttttctagatcaaaactctgcatggtctccctgagagactggagaagagctgccaatcaggatggattttttcctacacaggtatgacactgcagccacttcccttcttgggaaaattaaacttcattctgaagaatgtcctgttggtggtataagccaacccctgccctcctaaaaggggatagataattaaatttggttaattagcaatcagattcactggggaattgaaacccgtacttccctttcttctgtccctccaccaaagaaccggaacaaatggcttcatgtctttgtccagtctttctgcctaaagcaaaatagcatatattctccaggctgaaaagtagattcctcctcacccctactcaagacggccacatttcaatccaggctcttgaagacagggtctaatgaaaggatttctgttctttctctgtctgttccctctggcccagcttctagtcctctccttatgtccccacctccatggcagtggcaagagacccctgagagtcaatggtgctaacgttccccacctatatacccctatgtagtttatcgagatttgaacccagcacctgggtggctgtgttgggcggatacatttcacgtcctcaagaccacaaccctggcgacaggtctggattaattctgtaaagtagcaatctatatcatgctaaattcctgcactgaggttctacctcggctgaactgactcgtggatggttaagtttcctggggtggctggaacccatttactaagcctctaattggtttcattttggctcaagttgcatggtttcccgaatctatgcacctggagtaagcacttttctggttgccactgaaaagcatgccggcaaacgctgctctgttaattgctgtaataaacagactttattata

SEQ ID NO: 197 - DNA, 120 bp, Homo sapiens
gattctaccatcagaaaagaggccaaacttctatcatcatggtggatgtgaagtgtctgagtgactgtaaattgcagaaccaacttgagaagcttggattttcacctggcccaatactac

SEQ ID NO: 198 - DNA, 123 bp, Homo sapiens
cttccaccagaaagttgtatgaaaaaaagttagtacagttgttggtctcacctccctgtgcaccacctgtgatgaatggacccagagagctggatggagcgcaggacagtgatgacagcgaag

SEQ ID NO: 199 - DNA, 479 bp, Homo sapiens
gtgggctgcaagagcaccaagcaccagaatcacatatgggactatcaccaaagagagagactactgcgcggaagaccagactatcgagagctggagagaagaaggtttcccagtgggcttgaagcttgctgtgcttggtattttcatcattgtggtgtttgtctacctgactgtggaaaataagtcgctgtttggttaagtaatttaggagcaaagcaatgctccaagcgaggcctcctgcttcaggaaagaaccaaaacactaccctgaagggccagcctagcctgcagccctcccttgcagggagccttcccttgcactgtgctgctctcacagatcggtgtctgggctcagccaggtggaaggaacctgcctaaccaggcacctgtgttaagagcatgatggttaggaaatcccccaagtcatgtcaactctcattaaaggtgcttccatatttgagcaggcgtcaaacaaggaaa

SEQ ID NO: 200 - DNA, 82 bp, Homo sapiens
gctgcctggaaggcaggaagtggctctgcggggaattgtgaggcggactgcgagggaaagggggccttgttgagtccgccag

SEQ ID NO: 201 - DNA, 66 bp, Homo sapiens
cccaaatccggtctcctaagccgcagctgcttcccttcgcagtgatgaatggctcagggagggaag

SEQ ID NO: 202 - DNA, 64 bp, Homo sapiens
gtgaaactcacccagctttagtaaccaactcgattgcatagactttagataaccatgtgaaggg

SEQ ID NO: 203 - DNA, 65 bp, Homo sapiens
agcttaatatcattttgcaaggaaatatcatactctcaacagaaaaaagcaagaaactcaaaaaa

SEQ ID NO: 204 - DNA, 77 bp, Homo sapiens
tggcctgaggcttccaccactaaacgcaaagctgtagatacctattgcttggattataagccttccaagggaagaag

SEQ ID NO: 205 - protein, 181 aa, Homo sapiens
MVDVKCLSDCKLQNQLEKLGFSPGPILPSTRKLYEKKLVQLLVSPPCAPPVMNGPRELDGAQDSDDSEELNIILQGNIILSTEKSKKLKKWPEASTTKRKAVDTYCLDYKPSKGRRWAARAPSTRITYGTITKERDYCAEDQTIESWREEGFPVGLKLAVLGIFIIVVFVYLTVENKSLFG

SEQ ID NO: 206 - protein, 108 aa, Homo sapiens
MVDVKCLSDCKLQNQLEKLGFSPGPILPSTRKLYEKKLVQLLVSPPCAPPVMNGPRELDGAQDSDDSEGGLQEHQAPESHMGLSPKRETTARKTRLSRAGEKKVSQWA

SEQ ID NO: 207 - protein, 29 aa, Homo sapiens
MVDVKCLSDCKLQNQLEKLGFSPGPILLA

SEQ ID NO: 208 - protein, 70 aa, Homo sapiens
MVDVKCLSDCKLQNQLEKLGFSPGPILPSTRKLYEKKLVQLLVSPPCAPPVMNGPRELDGAQDSDDSEVA

SEQ ID NO: 209 - protein, 181 aa, Homo sapiens
MVDVKCLSDCKLQNQLEKLGFSPGPILPSTRKLYEKKLVQLLVSPPCAPPVMNGPRELDGAQDSDDSEELNIILQGNIILSTKKSKKLKKWPEASTTKRKAVDTYCLDYKPSKGRRWAARAPSTRITYGTITKERDYCAEDQTIESWREEGFPVGLKLAVLGIFIIVVFVYLTVENKSLFG

SEQ ID NO: 210 - protein, 108 aa, Homo sapiens; identical to SEQ ID NO: 206

SEQ ID NO: 211 - protein, 67 aa, Homo sapiens
MVDVKCLSDCKLQNQLEKLGFSPGPILRGLQEHQAPESHMGLSPKRETTARKTRLSRAGEKKVSQWA

SEQ ID NO: 212 - protein, 140 aa, Homo sapiens
MVDVKCLSDCKLQNQLEKLGFSPGPILQLNIILQGNIILSTEKSKKLKKWPEASTTKRKAVDTYCLDYKPSKGRRWAARAPSTRITYGTITKERDYCAEDQTIESWREEGFPVGLKLAVLGIFIIVVFVYLTVENKSLFG

SEQ ID NO: 213 - protein, 221 aa, Homo sapiens
AAWKAGSGSAGNCEADCEGKGALLSPPGFYHQKRGQTSIIMVDVKCLSDCKLQNQLEKLGFSPGPILPSTRKLYEKKLVQLLVSPPCAPPVMNGPRELDGAQDSDDSEELNIILQGNIILSTEKSKKLKKWPEASTTKRKAVDTYCLDYKPSKGRRWAARAPSTRITYGTITKERDYCAEDQTIESWREEGFPVGLKLAVLGIFIIVVFVYLTVENKSLFG

SEQ ID NO: 214 - protein, 148 aa, Homo sapiens
AAWKAGSGSAGNCEADCEGKGALLSPPGFYHQKRGQTSIIMVDVKCLSDCKLQNQLEKLGFSPGPILPSTRKLYEKKLVQLLVSPPCAPPVMNGPRELDGAQDSDDSEGGLQEHQAPESHMGLSPKRETTARKTRLSRAGEKKVSQWA

SEQ ID NO: 215 - protein, 107 aa, Homo sapiens [sequence omitted]

SEQ ID NO: 216 - protein, 140 aa, Homo sapiens; identical to SEQ ID NO: 212

SEQ ID NO: 217 - protein, 77 aa, Homo sapiens
MMPVPPCQHHRCGEACSPGPDSPPQGLSCRGQTEGPLSWTEPCPPSILLSPLPFSSLLRSHRGDCVRMWCLRWKLLG

SEQ ID NO: 218 - DNA, 41 bp, Artificial Organism
  Synthetic oligonucleotide
tctccccaacaacaagctgggagaggctagtgggagggatg

SEQ ID NO: 219 - DNA, 115 bp, Artificial Organism
  Synthetic oligonucleotide
tctccccaacaacaagctgggttccggggatgacatctctgtcttcgtcatccccctgggagggccaggcagttactcctgaggggctgaacaccatccctcccactagcctctc

SEQ ID NO: 220 - DNA, 17 bp, Artificial Organism
  Synthetic oligonucleotide
aggggctgcatggcatg

SEQ ID NO: 221 - DNA, 25 bp, Artificial Organism
  Synthetic oligonucleotide
tatgtgggaagacagatacacaggc

SEQ ID NO: 222 - DNA, 110 bp, Artificial Organism
  Synthetic oligonucleotide
aggggctgcatggcatggtggtaaggggatggcattggtgaaagaagggtcaaagggaagcaatgcttgggaccccacatgtgggcctgtgtatctgtcttcccacatac

SEQ ID NO: 223 - DNA, 19 bp, Artificial Organism
  Synthetic oligonucleotide
gaatcagcccaaagccagg

SEQ ID NO: 224 - DNA, 20 bp, Artificial Organism
  Synthetic oligonucleotide
gctggtgaaagcactgggtt

SEQ ID NO: 225 - DNA, 114 bp, Artificial Organism
  Synthetic oligonucleotide
gaatcagcccaaagccaggcgtccagggtctccctcacctgaagctgactttttccccaccttggacagagggcgggagatgccatccccactgaacccagtgctttcaccagc

SEQ ID NO: 226 - DNA, 21 bp, Artificial Organism
  Synthetic oligonucleotide
cattctccacgcatcagatga

SEQ ID NO: 227 - DNA, 20 bp, Artificial Organism
  Synthetic oligonucleotide
accatcagattggcagcatg

SEQ ID NO: 228 - DNA, 114 bp, Artificial Organism
  Synthetic oligonucleotide
cattctccacgcatcagatgatcctgtggcccctcagtgccaggccccactggccctctgcgcacatcagtgactctgatgttctcccccaccgcatgctgccaatctgatggt

SEQ ID NO: 229 - DNA, 24 bp, Artificial Organism
  Synthetic oligonucleotide
tggagattcctggtttaaagcatt

SEQ ID NO: 230 - DNA, 20 bp, Artificial Organism
  Synthetic oligonucleotide
ccccagcttagagctgcact

SEQ ID NO: 231 - DNA, 105 bp, Artificial Organism
  Synthetic oligonucleotide
tggagattcctggtttaaagcatttaaagcctctgtgaaaatttgcccaggccaacaacttcactttccacactcagtgccacgaagtgcagctctaagctgggg

SEQ ID NO: 232 - DNA, 19 bp, Artificial Organism
  Synthetic oligonucleotide
ctactccctcggcacaggc

SEQ ID NO: 233 - DNA, 20 bp, Artificial Organism
  Synthetic oligonucleotide
cagcagcactgtcatccagc

SEQ ID NO: 234 - DNA, 101 bp, Artificial Organism
  Synthetic oligonucleotide
ctactccctcggcacaggcattcggtttgatgagtgggatgagctgccccatggctttgccagcctctcagccaacatggagctggatgacagtgctgctg

SEQ ID NO: 235 - DNA, 21 bp, Artificial Organism
  Synthetic oligonucleotide
acgaggaactggaagctcagc

SEQ ID NO: 236 - DNA, 22 bp, Artificial Organism
  Synthetic oligonucleotide
aatgtggcattatggagcagtg

SEQ ID NO: 237 - DNA, 110 bp, Artificial Organism
  Synthetic oligonucleotide
acgaggaactggaagctcagcaaggttatgacctgctctttgttatccggtttacagccggcgagattgaaattcgaacccaagcttccactgctccataatgccacatt

SEQ ID NO: 238 - DNA, 19 bp, Artificial Organism
  Synthetic oligonucleotide
gtccctgcttcccatccct

SEQ ID NO: 239 - DNA, 22 bp, Artificial Organism
  Synthetic oligonucleotide
cttgcaaacacaggcttcattc

SEQ ID NO: 240 - DNA, 96 bp, Artificial Organism; identical to SEQ ID NO: 117
  Synthetic oligonucleotide

SEQ ID NO: 241 - DNA, 27 bp, Artificial Organism
  Synthetic oligonucleotide
aaagatcactgaactgggaactaagat

SEQ ID NO: 242 - DNA, 20 bp, Artificial Organism
  Synthetic oligonucleotide
ggtcctattcccatgccatg

SEQ ID NO: 243 - DNA, 101 bp, Artificial Organism
  Synthetic oligonucleotide
aaagatcactgaactgggaactaagattccttctattaccccagccctgacaccattttaccatgcttcagtctccttacccatggcatgggaataggacc

SEQ ID NO: 244 - DNA, 27 bp, Artificial Organism
  Synthetic oligonucleotide
aaagatcactgaactgggaactaagat

SEQ ID NO: 245 - DNA, 20 bp, Artificial Organism
  Synthetic oligonucleotide
ggtcctattcccatgccatg

SEQ ID NO: 246 - DNA, 21 bp, Artificial Organism
  Synthetic oligonucleotide
acgaggaactggaagctcagc

SEQ ID NO: 247 - DNA, 22 bp, Artificial Organism
  Synthetic oligonucleotide
aatgtggcattatggagcagtg

SEQ ID NO: 248 - DNA, 22 bp, Artificial Organism
  Synthetic oligonucleotide
cttgcaaacacaggcttcattc

SEQ ID NO: 249 - DNA, 19 bp, Artificial Organism
  Synthetic oligonucleotide
ctgcagctctggcagaacc

SEQ ID NO: 250 - DNA, 21 bp, Artificial Organism
  Synthetic oligonucleotide
cccaccctgaagacactcctc

SEQ ID NO: 251 - DNA, 102 bp, Artificial Organism
  Synthetic oligonucleotide
ctgcagctctggcagaaccactaagctctcagctcctagtcatcacatctttttcccttaaccctgccaagtcaaccagatgaggagtgtcttcagggtggg

SEQ ID NO: 252 - DNA, 20 bp, Artificial Organism
  Synthetic oligonucleotide
aatgcaatgcgactgcaaaa

SEQ ID NO: 253 - DNA, 25 bp, Artificial Organism
  Synthetic oligonucleotide
catttctcatgctttaagtggaagc

SEQ ID NO: 254 - DNA, 101 bp, Artificial Organism
  Synthetic oligonucleotide
aatgcaatgcgactgcaaaaaaggcaaagacctcagactctccttccaagggacctgtggttcgtgctgcgaagatgcttccacttaaagcatgagaaatg

SEQ ID NO: 255 - DNA, 20 bp, Artificial Organism
  Synthetic oligonucleotide
aatgcaatgcgactgcaaaa

SEQ ID NO: 256 - DNA, 25 bp, Artificial Organism
  Synthetic oligonucleotide
catttctcatgctttaagtggaagc

SEQ ID NO: 257 - DNA, 101 bp, Artificial Organism; identical to SEQ ID NO: 254
  Synthetic oligonucleotide

SEQ ID NO: 258 - DNA, 20 bp, Artificial Organism
  Synthetic oligonucleotide
aatgcaatgcgactgcaaaa

SEQ ID NO: 259 - DNA, 25 bp, Artificial Organism
  Synthetic oligonucleotide
catttctcatgctttaagtggaagc

SEQ ID NO: 260 - DNA, 20 bp, Artificial Organism
  Synthetic oligonucleotide
gcgaaacgcgatttgttgtt

SEQ ID NO: 261 - DNA, 19 bp, Artificial Organism
  Synthetic oligonucleotide
catctggaggagggaggga

SEQ ID NO: 262 - DNA, 153 bp, Artificial Organism
  Synthetic oligonucleotide
gcgaaacgcgatttgttgtttgtgggtctgatttgtgcgtgcggcttgggctcctgcggcttttggctcggccgggggccttgggcagcgaggctggagccggaagaggtggaggtgaagggctgcccgccacgtccctccctcctccagatg

SEQ ID NO: 263 - DNA, 20 bp, Artificial Organism
  Synthetic oligonucleotide
gcgaaacgcgatttgttgtt

SEQ ID NO: 264 - DNA, 19 bp, Artificial Organism
  Synthetic oligonucleotide
catctggaggagggaggga

SEQ ID NO: 265 - DNA, 26 bp, Artificial Organism
  Synthetic oligonucleotide
gaaggctcttgtcacttactagccat

SEQ ID NO: 266 - DNA, 24 bp, Artificial Organism
  Synthetic oligonucleotide
tgtcaccatatttaatcctcccaa

SEQ ID NO: 267 - DNA, 101 bp, Artificial Organism
  Synthetic oligonucleotide
gaaggctcttgtcacttactagccatgtgattttggaaagaaacttaacattaattccttcagctacaatggaattcttgggaggattaaatatggtgaca

SEQ ID NO: 268 - DNA, 20 bp, Artificial Organism
  Synthetic oligonucleotide
cctgctgtgttggaagtgca

SEQ ID NO: 269 - DNA, 20 bp, Artificial Organism
  Synthetic oligonucleotide
aaggtcctttcctcggagct

SEQ ID NO: 270 - DNA, 105 bp, Artificial Organism
  Synthetic oligonucleotide
cctgctgtgttggaagtgcaggaactggagcctgtgaccctgcgttgtgtggcccgtggcagccccctgcctcatgtgacgtggaagctccgaggaaaggacctt

SEQ ID NO: 271 - DNA, 19 bp, Artificial Organism
  Synthetic oligonucleotide
ccccagttcactttcgcct

SEQ ID NO: 272 - DNA, 19 bp, Artificial Organism
  Synthetic oligonucleotide
tctgatcacaccgccgtct

SEQ ID NO: 273 - DNA, 104 bp, Artificial Organism
  Synthetic oligonucleotide
ccccagttcactttcgcctgcttctgtggtctccacggcttctgcaaaatgaagaggaagaaggaggaagttcacagagagcgggagacggcggtgtgatcaga

SEQ ID NO: 274 - DNA, 24 bp, Artificial Organism
  Synthetic oligonucleotide
cccagagcttctgctagaatcttc

SEQ ID NO: 275 - DNA, 21 bp, Artificial Organism
  Synthetic oligonucleotide
actgacttactccccttgggc

SEQ ID NO: 276 - DNA, 102 bp, Artificial Organism
  Synthetic oligonucleotide
cccagagcttctgctagaatcttcccctagccagggcccaggactccttgcagttctgcctctcttccctcctacagccaggcccaaggggagtaagtcagt

SEQ ID NO: 277 - DNA, 21 bp, Artificial Organism
  Synthetic oligonucleotide
gagcaccaagcaccagaatca

SEQ ID NO: 278 - DNA, 22 bp, Artificial Organism
  Synthetic oligonucleotide
tgggaaaccttcttctctccag

SEQ ID NO: 279 - DNA, 100 bp, Artificial Organism
  Synthetic oligonucleotide
agcaccaagcaccagaatcacatatgggactatcaccaaagagagagactactgcgcggaagaccagactatcgagagctggagagaagaaggtttccca

SEQ ID NO: 280 - DNA, 21 bp, Artificial Organism
  Synthetic oligonucleotide
gagcaccaagcaccagaatca

SEQ ID NO: 281 - DNA, 22 bp, Artificial Organism
  Synthetic oligonucleotide
tgggaaaccttcttctctccag

SEQ ID NO: 282 - DNA, 101 bp, Artificial Organism
  Synthetic oligonucleotide
gagcaccaagcaccagaatcacatatgggactatcaccaaagagagagactactgcgcggaagaccagactatcgagagctggagagaagaaggtttccca

SEQ ID NO: 283 - DNA, 19 bp, Artificial Organism
  Synthetic oligonucleotide
agactccaacccacagccc

SEQ ID NO: 284 - DNA, 19 bp, Artificial Organism
  Synthetic oligonucleotide
cagctcagccaaccttgca

SEQ ID NO: 285 - DNA, 138 bp, Artificial Organism
  Synthetic oligonucleotide
agactccaacccacagcccagctgtggctgcacagtgagcctgatgggaggtggggaacagggacagggggccacctgggcttcttcacagagaggtcagcaggaaggcttggctacagtgcaaggttggctgagctg

SEQ ID NO: 286 - DNA, 18 bp, Artificial Organism
  Synthetic oligonucleotide
gtacctgagccctgccct

SEQ ID NO: 287 - DNA, 19 bp, Artificial Organism
  Synthetic oligonucleotide
ctcaagctgttcctggcga

SEQ ID NO: 288 - DNA, 99 bp, Artificial Organism
  Synthetic oligonucleotide
gtacctgagccctgccctccagcagaacccaggcccctagagtcctactgtaggattgagcctgagataccggagtcctctcgccaggaacagcttgag

SEQ ID NO: 289 - DNA, 19 bp, Artificial Organism
  Synthetic oligonucleotide
agactccaacccacagccc

SEQ ID NO: 290 - DNA, 19 bp, Artificial Organism
  Synthetic oligonucleotide
cagctcagccaaccttgca

SEQ ID NO: 291 - DNA, 138 bp, Artificial Organism; identical to SEQ ID NO: 285
  Synthetic oligonucleotide

SEQ ID NO: 292 - DNA, 50 bp, Homo sapiens
tttccagatcgatgggttccaaaagggatgacagagggaccttctgagct

SEQ ID NO: 293 - DNA, 50 bp, Homo sapiens
aaggcttggctacagtgcaaggttggctgagctgtgacaaggtcttctct

SEQ ID NO: 294 - DNA, 50 bp, Homo sapiens
catggtaacacggcctccatggctgagtaggggactaggaagggtaaaag

SEQ ID NO: 295 - DNA, 50 bp, Homo sapiens
aaagactctgcagctctggcagaaccactaagctctcagctcctagtcat

SEQ ID NO: 296 - DNA, 50 bp, Homo sapiens
tccctgaggtacgagtgtatgacctgacacaatatgagcactgcccagat

SEQ ID NO: 297 - DNA, 20 bp, Artificial Organism
  Synthetic oligonucleotide
tgggaacaagagggcatctg

SEQ ID NO: 298 - DNA, 22 bp, Artificial Organism
  Synthetic oligonucleotide
ccaccactgcatcaaattcatg

SEQ ID NO: 299 - DNA, 86 bp, Artificial Organism
  Synthetic oligonucleotide
tgggaacaagagggcatctgctaaagtttcagattccatttctgctcagtatccagtagtggatcatgaatttgatgcagtggtgg

SEQ ID NO: 300 - DNA, 19 bp, Artificial Organism
  Synthetic oligonucleotide
tgagagtgattcgcgtggg

SEQ ID NO: 301 - DNA, 21 bp, Artificial Organism
  Synthetic oligonucleotide
ccagggtacgaggctttcaat

SEQ ID NO: 302 - DNA, 91 bp, Artificial Organism
  Synthetic oligonucleotide
tgagagtgattcgcgtgggtacccgcaagagccagcttgctcgcatacagacggacagtgtggtggcaacattgaaagcctcgtaccctgg

SEQ ID NO: 303 - DNA, 21 bp, Artificial Organism
  Synthetic oligonucleotide
tgacactggcaaaacaatgca

SEQ ID NO: 304 - DNA, 21 bp, Artificial Organism
  Synthetic oligonucleotide
ggtccttttcaccagcaagct

SEQ ID NO: 305 - DNA, 94 bp, Artificial Organism
  Synthetic oligonucleotide
tgacactggcaaaacaatgcagactttgctttccttggtcaggcagtataatccaaagatggtcaaggtcgcaagcttgctggtgaaaaggacc

SEQ ID NO: 306 - DNA, 20 bp, Artificial Organism
  Synthetic oligonucleotide
tgcaccaccaactgcttagc

SEQ ID NO: 307 - DNA, 19 bp, Artificial Organism
  Synthetic oligonucleotide
ccatcacgccacagtttcc

SEQ ID NO: 308 - DNA, 116 bp, Artificial Organism
  Synthetic oligonucleotide
tgcaccaccaactgcttagcacccctggccaaggtcatccatgacaactttggtatcgtggaaggactcatgaccacagtccatgccatcactgccacccagaagactgtggatgg

SEQ ID NO: 309 - DNA, 20 bp, Artificial Organism
  Synthetic oligonucleotide
gaggccgtcaccaagaacat

SEQ ID NO: 310 - DNA, 19 bp, Artificial Organism
  Synthetic oligonucleotide
ggacagccggtcagagctc

SEQ ID NO: 311 - DNA, 111 bp, Artificial Organism
  Synthetic oligonucleotide
gaggccgtcaccaagaacattcacgagtcctgcatgagccagataggctggaaccgcatcatcgtggagaagcccttcgggagggacctgcagagctctgaccggctgtcc

SEQ ID NO: 312 - DNA, 20 bp, Artificial Organism
  Synthetic oligonucleotide
ctggcaagcagctggaagat

SEQ ID NO: 313 - DNA, 23 bp, Artificial Organism
  Synthetic oligonucleotide
tttcttagcaccaccacgaagtc

SEQ ID NO: 314 - DNA, 101 bp, Artificial Organism
  Synthetic oligonucleotide
ctggcaagcagctggaagatggacgtactttgtctgactacaatattcaaaaggagtctactcttcatcttgtgttgagacttcgtggtggtgctaagaaa

SEQ ID NO: 315 - DNA, 19 bp, Artificial Organism
  Synthetic oligonucleotide
atttgggtcgcggttcttg

SEQ ID NO: 316 - DNA, 21 bp, Artificial Organism
  Synthetic oligonucleotide
tgccttgacattctcgatggt

SEQ ID NO: 317 - DNA, 133 bp, Artificial Organism
  Synthetic oligonucleotide
atttgggtcgcggttcttgtttgtggatcgctgtgatcgtcacttgacaatgcagatcttcgtgaagactctgactggtaagaccatcaccctcgaggttgagcccagtgacaccatcgagaatgtcaaggca

SEQ ID NO: 318 - DNA, 23 bp, Artificial Organism
  Synthetic oligonucleotide
tggcaagaagaaggtctggttag

SEQ ID NO: 319 - DNA, 22 bp, Artificial Organism
  Synthetic oligonucleotide
tgatcagcccatctttgatgag

SEQ ID NO: 320 - DNA, 101 bp, Artificial Organism
  Synthetic oligonucleotide
tggcaagaagaaggtctggttagaccccaatgagaccaatgaaatcgccaatgccaactcccgtcagcagatccggaagctcatcaaagatgggctgatca

SEQ ID NO: 321 - DNA, 20 bp, Artificial Organism
  Synthetic oligonucleotide
cggtttgctgcggtaatcat

SEQ ID NO: 322 - DNA, 21 bp, Artificial Organism
  Synthetic oligonucleotide
tttcttgctgccagtctggac

SEQ ID NO: 323 - DNA, 122 bp, Artificial Organism
  Synthetic oligonucleotide
cggtttgctgcggtaatcatgaggataagagagccacgaaccacggcactgattttcagttctgggaaaatggtgtgcacaggagccaagagtgaagaacagtccagactggcagcaagaaa

SEQ ID NO: 324 - DNA, 26 bp, Artificial Organism
  Synthetic oligonucleotide
gaaggctcttgtcacttactagccat

SEQ ID NO: 325 - DNA, 24 bp, Artificial Organism
  Synthetic oligonucleotide
tgtcaccatatttaatcctcccaa

SEQ ID NO: 326 - DNA, 101 bp, Artificial Organism; identical to SEQ ID NO: 267
  Synthetic oligonucleotide

SEQ ID NO: 327 - DNA, 104 bp, Artificial Organism; identical to SEQ ID NO: 273
  Synthetic oligonucleotide

SEQ ID NO: 328 - DNA, 24 bp, Artificial Organism
  Synthetic oligonucleotide
cccagagcttctgctagaatcttc

SEQ ID NO: 329 - DNA, 21 bp, Artificial Organism
  Synthetic oligonucleotide
actgacttactccccttgggc

SEQ ID NO: 330 - DNA, 102 bp, Artificial Organism; identical to SEQ ID NO: 276
  Synthetic oligonucleotide

SEQ ID NO: 331 - DNA, 21 bp, Artificial Organism
  Synthetic oligonucleotide
gagcaccaagcaccagaatca

SEQ ID NO: 332 - DNA, 22 bp, Artificial Organism
  Synthetic oligonucleotide
tgggaaaccttcttctctccag

SEQ ID NO: 333 - DNA, 101 bp, Artificial Organism; identical to SEQ ID NO: 282
  Synthetic oligonucleotide

SEQ ID NO: 334 - DNA, 2916 bp, Homo sapiens
ggtggcccagagcaagggcaagtttcgcccgggacccgcccagctggccgggagccagtagcagggaagggccggctggcgcgagcaccgcccacgcggagccatgggggcggggcctgggcgggggcggggccgcggccgagggcggggcagggaggcagcatgctaaaccgggtgcgctcggccgtggcgcacctggtgagctccgggggcgctccgcctccgcgccccaaatccccggacctgcccaacgccgcctcggcgccgcccgccgccgctccagaagcgcccaggagccctcccgcgaaggctgggagcgggagcgcgacgcccgcgaaggctgttgaggctcgagcgagcttctccagaccgacctttctgcagctgagccccggggggctgcgacgcgccgatgaccacgcgggccgggctgtgcaaagccccccggacacgggccgccgcctgccctggagcacaggctacgccgagtgagcgccccctggggcacccaaaccaggatggggctcccacccctctccccagctccgcatccccggcgctaggacgcgttccccacgccgcgtccgggccaggagctcccttttccgtggacctttgctatcctctggtcttcgggccgcaccccctcccaacccattttccagtggggggcagcctgtgtcaccttcttcacgtccttcccgctcattgactgccctcgcccacgccgcctcaggaccctgttctgccccagagcccggagggcggagagcccggcgaaggatgagttggccagttccccgtcgcggcccggcagcttaaaggctaagggaaaaggggtttcacgaaggagcggggttctttttaataggggacatagcggttgggaagactcgctcacccgcttcccggctccagcgccccagttccctgtccctcttaccgtagttcccctccccctccacacccagaaatagcccgcgacaccaggaggccgccagcttccccaggagcggggagggggacgcccggggtagaggagggtcccatttagatgcccttcagcctgccaactcgtgctggcctggcaaagaagcggaccccctgcccggagcggccggctggcccccgggctgtgtgtattttaaatgcatctgccgggaacgcagagcaccgagggagatgggggcgctcagttcgctgaggaaggtggctggtggcccatggacccaccaccacctcccttagcctcctgtgtgggaggagtttatgggtatgtggctcctgcccagtccaggtgggctttcacttctactctatttcagttcctctttcccgatctgggctggagagcttcctcattgttaaggcagcagaaactttcgctggatggttttaggataaggggtcatcaatgctggcaagagtcggcacaatgaggaccaggcttgctgtgaagtggtgtatgtggaaggtcggaggagtgttacaggagtacctagggagcctagccgaggccagggactctgcttctactactggggcctatttgatgggcatgcagggggcggagctgctgaaatggcctcacggctcctgcatcgccatatccgagagcagctaaaggacctggtagagatacttcaggacccttcgccaccacccctctgcctcccaaccactccggggaccccagattcctccgatccctctcacttgcttggccctcagtcctgctggtcttcacagaaggaagtgagccacgagagcctggtagtgggggccattgagaatgccttccagctcatggatgagcagatggcccgggagcggcgtggccaccaagtggaggggggctgctgtgcactggttgtgatctacctgctaggcaaggtgtacgtggccaatgcaggcgatagcagggccatcattgtccggaatggtgaaatcattccaatgtcccgggagtttaccccggagactgagcgccagcgtcttcagctgcttggcttcctgaaaccagagctgctaggcagtgaattcacccaccttgagttcccccgcagagttctgcccaaggagctggggcagaggatgttgtaccgggaccagaacatgaccggctgggcctacaaaaagatcgagctggaggatctcaggtttcctctggtctgtggggagggcaaaaaggctcgggtgatggccaccattggggtgacccgaggcttgggagaccacagccttaaggtctgcagttccaccctgcccatcaagccctttctctcctgcttccctgaggtacgagtgtatgacctgacacaatatgagcactgcccagatgatgtgctagtcctgggaacagatggcctgtgggatgtcactactgactgtgaggtagctgccactgtggacagggtgctgtcggcctatgagcctaatgaccacagcaggtaggggctgcatggcatggtggtaaggggatggcattggtgaaagaagggtcaaagggaagcaatgcttgggaccccacatgtgggcctgtgtatctgtcttcccacatacatgttggtacatgaatgtgcatgtgtgctcctggcaggtatacagctctggcccaagctctggtcctgggggcccggggtaccccccgagaccgtggctggcgtctccccaacaacaagctgggttccggggatgacatctctgtcttcgtcatccccctgggagggccaggcagttactcctgaggggctgaacaccatccctcccactagcctctccatacttactcctctcacagcccaaattctgaagttgtctccctgacccttctttagtggcaacttaactgaagaagggatgtccgctatatccaaaattacagctattggcaaataaacgagatggataaaggtg

SEQ ID NO: 335 - DNA, 2277 bp, Homo sapiens
gactgcgcggcggcaacagcagacatgtcgggggtccggggcctgtcgcggctgctgagcgctcggcgcctggcgctggccaaggcgtggccaacagtgttgcaaacaggaacccgaggttttcacttcactgttgatgggaacaagagggcatctgctaaagtttcagattccatttctgctcagtatccagtagtggatcatgaatttgatgcagtggtggtaggcgctggaggggcaggcttgcgagctgcatttggcctttctgaggcagggtttaatacagcatgtgttaccaagctgtttcctaccaggtcacacactgttgcagcgcagggaggaatcaatgctgctctggggaacatggaggaggacaactggaggtggcatttctacgacaccgtgaagggctccgactggctgggggaccaggatgccatccactacatgacggagcaggcccccgccgccgtggtcgagctagaaaattatggcatgccgtttagcagaactgaagatgggaagatttatcagcgtgcatttggtggacagagcctcaagtttggaaagggcgggcaggcccatcggtgctgctgtgtggctgatcggactggccactcgctattgcacaccttatatggacggtctctgcgatatgataccagctattttgtggagtattttgccttggatctcctgatggagaacggggagtgccgtggtgtcatcgcactgtgcatagaggacgggtccatccatcgcataagagcaaagaacactgttgttgccacaggaggctacgggcgcacctacttcagctgcacgtctgcccacaccagcactggcgacggcacggccatgatcaccagggcaggccttccttgccaggacctagagtttgttcagttccaccccacaggcatatatggtgctggttgtctcattacggaaggatgtcgtggagagggaggcattctcattaacagtcaaggcgaaaggtttatggagcgatacgcccctgtcgcgaaggacctggcgtctagagatgtggtgtctcggtcgatgactctggagatccgagaaggaagaggctgtggccctgagaaagatcacgtctacctgcagctgcaccacctacctccagagcagctggccacgcgcctgcctggcatttcagagacagccatgatcttcgctggcgtggacgtcacgaaggagccgatccctgtcctccccaccgtgcattataacatgggcggcattcccaccaactacaaggggcaggtcctgaggcacgtgaatggccaggatcagattgtgcccggcctgtacgcctgtggggaggccgcctgtgcctcggtacatggtgccaaccgcctcggggcaaactcgctcttggacctggttgtctttggtcgggcatgtgccctgagcatcgaagagtcatgcaggcctggagataaagtccctccaattaaaccaaacgctggggaagaatctgtcatgaatcttgacaaattgagatttgctgatggaagcataagaacatcggaactgcgactcagcatgcagaagtcaatgcaaaatcatgctgccgtgttccgtgtgggaagcgtgttgcaagaaggttgtgggaaaatcagcaagctctatggagacctaaagcacctgaagacgttcgaccggggaatggtctggaacacagacctggtggagaccctggagctgcagaacctgatgctgtgtgcgctgcagaccatctacggagcagaggcgcggaaggagtcacggggcgcgcatgccagggaagactacaaggtgcggattgatgagtacgattactccaagcccatccaggggcaacagaagaagccctttgaggagcactggaggaagcacaccctgtcctttgtggacgttggcactgggaaggtcactctggaatatagacccgtaatcgacaaaactttgaacgaggctgactgtgccaccatcccgccagccattcgctcctactgatgagacaagatgtggtgatgacagaatcagcttttgtaattatgtataatagctcatgcatgtgtccatgtcataactgtcttcatacgcttctgcactctggggaagaaggagtacattgaagggagattggcacctagtggctgggagcttgccaggaacccagtggccagggagcgtggcacttacctttgtcccttgcttcattcttgtgagatgataaaactgggcacagctcttaaataaaatataaatgag

SEQ ID NO: 336 - DNA, 1536 bp, Homo sapiens
gtgacgcgaggctctgcggagaccaggagtcagactgtaggacgacctcgggtcccacgtgtccccggtactcgccggccggagcccccggcttcccggggccgggggaccttagcggcacccacacacagcctactttccaagcggagccatgtctggtaacggcaatgcggctgcaacggcggaagaaaacagcccaaagatgagagtgattcgcgtgggtacccgcaagagccagcttgctcgcatacagacggacagtgtggtggcaacattgaaagcctcgtaccctggcctgcagtttgaaatcattgctatgtccaccacaggggacaagattcttgatactgcactctctaagattggagagaaaagcctgtttaccaaggagcttgaacatgccctggagaagaatgaagtggacctggttgttcactccttgaaggacctgcccactgtgcttcctcctggcttcaccatcggagccatctgcaagcgggaaaaccctcatgatgctgttgtctttcacccaaaatttgttgggaagaccctagaaaccctgccagagaagagtgtggtgggaaccagctccctgcgaagagcagcccagctgcagagaaagttcccgcatctggagttcaggagtattcggggaaacctcaacacccggcttcggaagctggacgagcagcaggagttcagtgccatcatcctggcaacagctggcctgcagcgcatgggctggcacaaccgggtggggcagatcctgcaccctgaggaatgcatgtatgctgtgggccagggggccttgggcgtggaagtgcgagccaaggaccaggacatcttggatctggtgggtgtgctgcacgatcccgagactctgcttcgctgcatcgctgaaagggccttcctgaggcacctggaaggaggctgcagtgtgccagtagccgtgcatacagctatgaaggatgggcaactgtacctgactggaggagtctggagtctagacggctcagatagcatacaagagaccatgcaggctaccatccatgtccctgcccagcatgaagatggccctgaggatgacccacagttggtaggcatcactgctcgtaacattccacgagggccccagttggctgcccagaacttgggcatcagcctggccaacttgttgctgagcaaaggagccaaaaacatcctggatgttgcacggcagcttaacgatgcccattaactggtttgtggggcacagatgcctgggttgctgctgtccagtgcctacatcccgggcctcagtgccccattctcactgctatctggggagtgattaccccgggagactgaactgcagggttcaagccttccagggatttgcctcaccttggggccttgatgactgccttgcctcctcagtatgtgggggcttcatctctttagagaagtccaagcaacagcctttgaatgtaaccaatcctactaataaaccagttctgaaggtaaaaaaaaaaaaaaaaaaaaaaaaaaaaaaaaaaa

SEQ ID NO: 337 - DNA, 1331 bp, Homo sapiens
tcttgctgcgcctccgcctcctcctctgctccgccaccggcttcctcctcctgagcagtcagcccgcgcgccggccggctccgttatggcgacccgcagccctggcgtcgtgattagtgatgatgaaccaggttatgaccttgatttattttgcatacctaatcattatgctgaggatttggaaagggtgtttattcctcatggactaattatggacaggactgaacgtcttgctcgagatgtgatgaaggagatgggaggccatcacattgtagccctctgtgtgctcaaggggggctataaattctttgctgacctgctggattacatcaaagcactgaatagaaatagtgatagatccattcctatgactgtagattttatcagactgaagagctattgtaatgaccagtcaacaggggacataaaagtaattggtggagatgatctctcaactttaactggaaagaatgtcttgattgtggaagatataattgacactggcaaaacaatgcagactttgctttccttggtcaggcagtataatccaaagatggtcaaggtcgcaagcttgctggtgaaaaggaccccacgaagtgttggatataagccagactttgttggatttgaaattccagacaagtttgttgtaggatatgcccttgactataatgaatacttcagggatttgaatcatgtttgtgtcattagtgaaactggaaaagcaaaatacaaagcctaagatgagagttcaagttgagtttggaaacatctggagtcctattgacatcgccagtaaaattatcaatgttctagttctgtggccatctgcttagtagagctttttgcatgtatcttctaagaattttatctgttttgtactttagaaatgtcagttgctgcattcctaaactgtttatttgcactatgagcctatagactatcagttccctttgggcggattgttgtttaacttgtaaatgaaaaaattctcttaaaccacagcactattgagtgaaacattgaactcatatctgtaagaaataaagagaagatatattagttttttaattggtattttaatttttatatatgcaggaaagaatagaagtgattgaatattgttaattataccaccgtgtgttagaaaagtaagaagcagtcaattttcacatcaaagacagcatctaagaagttttgttctgtcctggaattattttagtagtgtttcagtaatgttgactgtattttccaacttgttcaaattattaccagtgaatctttgtcagcagttcccttttaaatgcaaatcaataaattcccaaaaattt

SEQ ID NO: 338 - DNA, 1261 bp, Homo sapiens
cttttgcgtcgccagccgagccacatcgctcagacaccatggggaaggtgaaggtcggagtcaacggatttggtcgtattgggcgcctggtcaccagggctgcttttaactctggtaaagtggatattgttgccatcaatgaccccttcattgacctcaactacatggtttacatgttccaatatgattccacccatggcaaattccatggcaccgtcaaggctgagaacgggaagcttgtcatcaatggaaatcccatcaccatcttccaggagcgagatccctccaaaatcaagtggggcgatgctggcgctgagtacgtcgtggagtccactggcgtcttcaccaccatggagaaggctggggctcatttgcaggggggagccaaaagggtcatcatctctgccccctctgctgatgcccccatgttcgtcatgggtgtgaaccatgagaagtatgacaacagcctcaagatcatcagcaatgcctcctgcaccaccaactgcttagcacccctggccaaggtcatccatgacaactttggtatcgtggaaggactcatgaccacagtccatgccatcactgccacccagaagactgtggatggcccctccgggaaactgtggcgtgatggccgcggggctctccagaacatcatccctgcctctactggcgctgccaaggctgtgggcaaggtcatccctgagctgaacgggaagctcactggcatggccttccgtgtccccactgccaacgtgtcagtggtggacctgacctgccgtctagaaaaacctgccaaatatgatgacatcaagaaggtggtgaagcaggcgtcggagggccccctcaagggcatcctgggctacactgagcaccaggtggtctcctctgacttcaacagcgacacccactcctccacctttgacgctggggctggcattgccctcaacgaccactttgtcaagctcatttcctggtatgacaacgaatttggctacagcaacagggtggtggacctcatggcccacatggcctccaaggagtaagacccctggaccaccagccccagcaagagcacaagaggaagagagagaccctcactgctggggagtccctgccacactcagtcccccaccacactgaatctcccctcctcacagttgccatgtagaccccttgaagaggggaggggcctagggagccgcaccttgtcatgtaccatcaataaagtaccctgtgctcaaccaaaaaaaaaaaaaaa

SEQ ID NO: 339 - DNA, 2395 bp, Homo sapiens
agaggcaggggctggcctgggatgcgcgcgcacctgccctcgccccgccccgcccgcacgaggggtggtggccgaggccccgccccgcacgcctcgcctgaggcgggtccgctcagcccaggcgcccgcccccgcccccgccgattaaatgggccggcggggctcagcccccggaaacggtcgtacacttcggggctgcgagcgcggagggcgacgacgacgaagcgcagacagcgtcatggcagagcaggtggccctgagccggacccaggtgtgcgggatcctgcgggaagagcttttccagggcgatgccttccatcagtcggatacacacatattcatcatcatgggtgcatcgggtgacctggccaagaagaagatctaccccaccatctggtggctgttccgggatggccttctgcccgaaaacaccttcatcgtgggctatgcccgttcccgcctcacagtggctgacatccgcaaacagagtgagcccttcttcaaggccaccccagaggagaagctcaagctggaggacttctttgcccgcaactcctatgtggctggccagtacgatgatgcagcctcctaccagcgcctcaacagccacatgaatgccctccacctggggtcacaggccaaccgcctcttctacctggccttgcccccgaccgtctacgaggccgtcaccaagaacattcacgagtcctgcatgagccagataggctggaaccgcatcatcgtggagaagcccttcgggagggacctgcagagctctgaccggctgtccaaccacatctcctccctgttccgtgaggaccagatctaccgcatcgaccactacctgggcaaggagatggtgcagaacctcatggtgctgagatttgccaacaggatcttcggccccatctggaaccgggacaacatcgcctgcgttatcctcaccttcaaggagccctttggcactgagggtcgcgggggctatttcgatgaatttgggatcatccgggacgtgatgcagaaccacctactgcagatgctgtgtctggtggccatggagaagcccgcctccaccaactcagatgacgtccgtgatgagaaggtcaaggtgttgaaatgcatctcagaggtgcaggccaacaatgtggtcctgggccagtacgtggggaaccccgatggagagggcgaggccaccaaagggtacctggacgaccccacggtgccccgcgggtccaccaccgccacttttgcagccgtcgtcctctatgtggagaatgagaggtgggatggggtgcccttcatcctgcgctgcggcaaggccctgaacgagcgcaaggccgaggtgaggctgcagttccatgatgtggccggcgacatcttccaccagcagtgcaagcgcaacgagctggtgatccgcgtgcagcccaacgaggccgtgtacaccaagatgatgaccaagaagccgggcatgttcttcaaccccgaggagtcggagctggacctgacctacggcaacagatacaagaacgtgaagctccctgacgcctacgagcgcctcatcctggacgtcttctgcgggagccagatgcacttcgtgcgcagcgacgagctccgtgaggcctggcgtattttcaccccactgctgcaccagattgagctggagaagcccaagcccatcccctatatttatggcagccgaggccccacggaggcagacgagctgatgaagagagtgggtttccagtatgagggcacctacaagtgggtgaacccccacaagctctgagccctgggcacccacctccacccccgccacggccaccctccttcccgccgcccgaccccgagtcgggaggactccgggaccattgacctcagctgcacattcctggccccgggctctggccaccctggcccgcccctcgctgctgctactacccgagcccagctacattcctcagctgccaagcactcgagaccatcctggcccctccagaccctgcctgagcccaggagctgagtcacctcctccactcactccagcccaacagaaggaaggaggagggcgcccattcgtctgtcccagagcttattggccactgggtctcactcctgagtggggccagggtgggagggagggacaagggggaggaaaggggcgagcacccacgtgagagaatctgcctgtggccttgcccgccagcctcagtgccacttgacattccttgtcaccagcaacatctcgagccccctggatgtcccctgtcccaccaactctgcactccatggccaccccgtgccacccgtaggcagcctctctgctataagaaaagcagacgcagcagctgggacccctcccaacctcaatgccctgccattaaatccgcaaacagcc

SEQ ID NO: 340 - DNA, 541 bp, Homo sapiens
cttttcgatccgccatctgcggtggagccgccaccaaaatgcagattttcgtgaaaacccttacggggaagaccatcaccctcgaggttgaaccctcggatacgatagaaaatgtaaaggccaagatccaggataaggaaggaattcctcctgatcagcagagactgatctttgctggcaagcagctggaagatggacgtactttgtctgactacaatattcaaaaggagtctactcttcatcttgtgttgagacttcgtggtggtgctaagaaaaggaagaagaagtcttacaccactcccaagaagaataagcacaagagaaagaaggttaagctggctgtcctgaaatattataaggtggatgagaatggcaaaattagtcgccttcgtcgagagtgcccttctgatgaatgtggtgctggggtgtttatggcaagtcactttgacagacattattgtggcaaatgttgtctgacttactgtttcaacaaaccagaagacaagtaactgtatgagttaataaaagacatgaactaaca

SEQ ID NO: 341 - DNA, 2201 bp, Homo sapiens
cgggatttgggtcgcggttcttgtttgtggatcgctgtgatcgtcacttgacaatgcagatcttcgtgaagactctgactggtaagaccatcaccctcgaggttgagcccagtgacaccatcgagaatgtcaaggcaaagatccaagataaggaaggcatccctcctgaccagcagaggctgatctttgctggaaaacagctggaagatgggcgcaccctgtctgactacaacatccagaaagagtccaccctgcacctggtgctccgtctcagaggtgggatgcaaatcttcgtgaagacactcactggcaagaccatcacccttgaggtggagcccagtgacaccatcgagaacgtcaaagcaaagatccaggacaaggaaggcattcctcctgaccagcagaggttgatctttgccggaaagcagctggaagatgggcgcaccctgtctgactacaacatccagaaagagtctaccctgcacctggtgctccgtctcagaggtgggatgcagatcttcgtgaagaccctgactggtaagaccatcaccctcgaggtggagcccagtgacaccatcgagaatgtcaaggcaaagatccaagataaggaaggcattcctcctgatcagcagaggttgatctttgccggaaaacagctggaagatggtcgtaccctgtctgactacaacatccagaaagagtccaccttgcacctggtactccgtctcagaggtgggatgcaaatcttcgtgaagacactcactggcaagaccatcacccttgaggtcgagcccagtgacactatcgagaacgtcaaagcaaagatccaagacaaggaaggcattcctcctgaccagcagaggttgatctttgccggaaagcagctggaagatgggcgcaccctgtctgactacaacatccagaaagagtctaccctgcacctggtgctccgtctcagaggtgggatgcagatcttcgtgaagaccctgactggtaagaccatcaccctcgaagtggagccgagtgacaccattgagaatgtcaaggcaaagatccaagacaaggaaggcatccctcctgaccagcagaggttgatctttgccggaaaacagctggaagatggtcgtaccctgtctgactacaacatccagaaagagtccaccttgcacctggtgctccgtctcagaggtgggatgcagatcttcgtgaagaccctgactggtaagaccatcactctcgaggtggagccgagtgacaccattgagaatgtcaaggcaaagatccaagacaaggaaggcatccctcctgatcagcagaggttgatctttgctgggaaacagctggaagatggacgcaccctgtctgactacaacatccagaaagagtccaccctgcacctggtgctccgtcttagaggtgggatgcagatcttcgtgaagaccctgactggtaagaccatcactctcgaagtggagccgagtgacaccattgagaatgtcaaggcaaagatccaagacaaggaaggcatccctcctgaccagcagaggttgatctttgctgggaaacagctggaagatggacgcaccctgtctgactacaacatccagaaagagtccaccctgcacctggtgctccgtcttagaggtgggatgcagatcttcgtgaagaccctgactggtaagaccatcactctcgaagtggagccgagtgacaccattgagaatgtcaaggcaaagatccaagacaaggaaggcatccctcctgaccagcagaggttgatctttgctgggaaacagctggaagatggacgcaccctgtctgactacaacatccagaaagagtccaccctgcacctggtgctccgtctcagaggtgggatgcagatcttcgtgaagaccctgactggtaagaccatcaccctcgaggtggagcccagtgacaccatcgagaatgtcaaggcaaagatccaagataaggaaggcatccctcctgatcagcagaggttgatctttgctgggaaacagctggaagatggacgcaccctgtctgactacaacatccagaaagagtccactctgcacttggtcctgcgcttgagggggggtgtctaagtttccccttttaaggtttcaacaaatttcattgcactttcctttcaataaagttgttgcattcccaaaaaaaaaaaaaaaaaaaaaaaa

SEQ ID NO: 342 - DNA, 748 bp, Homo sapiens
gcagataatgggaggagccgggcccgagcgagctctttcctttcgctgctgcggccgcagccatgagtatgctcaggcttcagaagaggctcgcctctagtgtcctccgctgtggcaagaagaaggtctggttagaccccaatgagaccaatgaaatcgccaatgccaactcccgtcagcagatccggaagctcatcaaagatgggctgatcatccgcaagcctgtgacggtccattcccgggctcgatgccggaaaaacaccttggcccgccggaagggcaggcacatgggcataggtaagcggaagggtacagccaatgcccgaatgccagagaaggtcacatggatgaggagaatgaggattttgcgccggctgctcagaagataccgtgaatctaagaagatcgatcgccacatgtatcacagcctgtacctgaaggtgaaggggaatgtgttcaaaaacaagcggattctcatggaacacatccacaagctgaaggcagacaaggcccgcaagaagctcctggctgaccaggctgaggcccgcaggtctaagaccaaggaagcacgcaagcgccgtgaagagcgcctccaggccaagaaggaggagatcatcaagactttatccaaggaggaagagaccaagaaataaaacctcccactttgtctgtacatactggcctctgtgattacatagatcagccattaaaataaaacaagccttaatctgcaaaaaaaaaaaaaaaa

SEQ ID NO: 343 - DNA, 1867 bp, Homo sapiens
ggttcgctgtggcgggcgcctgggccgccggctgtttaacttcgcttccgctggcccatagtgatctttgcagtgacccagcagcatcactgtttcttggcgtgtgaagataacccaaggaattgaggaagttgctgagaagagtgtgctggagatgctctaggaaaaaattgaatagtgagacgagttccagcgcaagggtttctggtttgccaagaagaaagtgaacatcatggatcagaacaacagcctgccaccttacgctcagggcttggcctcccctcagggtgccatgactcccggaatccctatctttagtccaatgatgccttatggcactggactgaccccacagcctattcagaacaccaatagtctgtctattttggaagagcaacaaaggcagcagcagcaacaacaacagcagcagcagcagcagcagcagcaacagcaacagcagcagcagcagcagcagcagcagcagcagcagcagcagcagcagcagcagcagcaacaggcagtggcagctgcagccgttcagcagtcaacgtcccagcaggcaacacagggaacctcaggccaggcaccacagctcttccactcacagactctcacaactgcacccttgccgggcaccactccactgtatccctcccccatgactcccatgacccccatcactcctgccacgccagcttcggagagttctgggattgtaccgcagctgcaaaatattgtatccacagtgaatcttggttgtaaacttgacctaaagaccattgcacttcgtgcccgaaacgccgaatataatcccaagcggtttgctgcggtaatcatgaggataagagagccacgaaccacggcactgattttcagttctgggaaaatggtgtgcacaggagccaagagtgaagaacagtccagactggcagcaagaaaatatgctagagttgtacagaagttgggttttccagctaagttcttggacttcaagattcagaatatggtggggagctgtgatgtgaagtttcctataaggttagaaggccttgtgctcacccaccaacaatttagtagttatgagccagagttatttcctggtttaatctacagaatgatcaaacccagaattgttctccttatttttgtttctggaaaagttgtattaacaggtgctaaagtcagagcagaaatttatgaagcatttgaaaacatctaccctattctaaagggattcaggaagacgacgtaatggctctcatgtacccttgcctcccccacccccttctttttttttttttaaacaaatcagtttgttttggtacctttaaatggtggtgttgtgagaagatggatgttgagttgcagggtgtggcaccaggtgatgcccttctgtaagtgcccaccgcgggatgccgggaaggggcattatttgtgcactgagaacaccgcgcagcgtgactgtgagttgctcataccgtgctgctatctgggcagcgctgcccatttatttatatgtagattttaaacactgctgttgacaagttggtttgagggagaaaactttaagtgttaaagccacctctataattgattggactttttaattttaatgtttttccccatgaaccacagtttttatatttctaccagaaaagtaaaaatcttttttaaaagtgttgtttttctaatttataactcctaggggttatttctgtgccagacacattccacctctccagtattgcaggacagaatatatgtgttaatgaaaatgaatggctgtacatatttttttctttcttcagagtactctgtacaataaatgcagtttataaaagtgttaaaaaaaaaaaaaaaaaaaaaa

SEQ ID NO: 344 - protein, 1013 aa, Homo sapiens; identical to SEQ ID NO: 133

SEQ ID NO: 345 - DNA, 1201 bp, Homo sapiens
ggaggcgctcggggcatccgaggcggggaggcgggtccgccccctattgtgtagcggcgagagtggagccgagcggtgcggagcagatctggtggttctccggagagcagcttccttgggtgttacatgagccaagccctcactgtacagaagagtgagagctgaaacctgttccctgagctgatcagaaggacatcccttggcccctccatctgggctcctgtggataggaggggctgggtgagcaggccagctgggctatggtgtggtgcctcggcctggccgtcctcagcctggtcatcagccagggggctgacggtcgagggaagcctgaggtggtatcggtggtgggccgggctggggagagtgtggtgctgggctgtgacctgctgcccccggccggccggccccccctgcatgtcatcgagtggctgcgctttggattcctgcttcccatcttcatccagttcggcctctactctccccgaattgaccctgattacgtgggtgactgtgggttccctgccttccgagagcttaagagagcagagactgtgtctcctgttttcttcacacgccgctgcatatgggaagatctgaagtcaacaggctttagccctgcaggtggagggaggcctccaggaggtgggcccaggactcaggaggactcagggctgccctgctggcgatcttcctgttctgtaacactacaggtctagcagtccagctgtcacagaaaagctaggacatgcagtatgcttctttggatattctgagtaacatttggactgttacccattggctaccagcatctcccaagtgagaatacatagattacccccagtgccctgaacagcactcggtcctaacacccgtgtccatggaaagcacgccgcgtctggagaaagaagcctggctttgtcacttactagccatgtgattttggaaagaaacttaacattaattccttcagctacaatggaattcttgggaggattaaatatggtgacaacgcctaatattgatggcctgtattccacactcaatcttccttccctcttcttccttctttgtagagctataatgaaaagtatcatgtgggacacagaagaggttgcagtctggggtctgcagggcttagcggccaggcagattagctttcttgaggaatcctgacagtgggtggaagggtatgatgatg

SEQ ID NO: 346 - DNA, 713 bp, Homo sapiens
ggaggcgctcggggcatccgaggcggggaggcgggtccgccccctattgtgtagcggcgagagtggagccgagcggtgcggagcagatctggtggttctccggagagcagcttccttgggtgttacatgagccaagccctcactgtacagaagagtgagagctgaaacctgttccctgagctgatcagaaggacatcccttggcccctccatctgggctcctgtggataggaggggctgggtgagcaggccagctgggctatggtgtggtgcctcggcctggccgtcctcagcctggtcatcagccagggggctgacggtcgagggaagcctgaggtggtatcggtggtgggccgggctggggagagtgtggtgctgggctgtgacctgctgcccccggccggccggccccccctgcatgtcatcgagtggctgcgctttggattcctgcttcccatcttcatccagttcggcctctactctccccgaattgaccctgattacgtgggtaagagttctcctcaggtgggaggtagggaggtatcagcaagaaaggtgggctgggtagagtcgcacaaggcctcctatgaacggctttgtccctgctctgatctcatctccagctctgctgccttaactctgcttaataagcatggctgtgctcccaagcagtgttaattcattgaaagatgtcattcatttacacacacacac

SEQ ID NO: 347 - DNA, 200 bp, Homo sapiens
gttctcctcaggtgggaggtagggaggtatcagcaagaaaggtgggctgggtagagtcgcacaaggcctcctatgaacggctttgtccctgctctgatctcatctccagctctgctgccttaactctgcttaataagcatggctgtgctcccaagcagtgttaattcattgaaagatgtcattcatttacacacacacac

SEQ ID NO: 348 - DNA, 695 bp, Homo sapiens
gtgactgtgggttccctgccttccgagagcttaagagagcagagactgtgtctcctgttttcttcacacgccgctgcatatgggaagatctgaagtcaacaggctttagccctgcaggtggagggaggcctccaggaggtgggcccaggactcaggaggactcagggctgccctgctggcgatcttcctgttctgtaacactacaggtctagcagtccagctgtcacagaaaagctaggacatgcagtatgcttctttggatattctgagtaacatttggactgttacccattggctaccagcatctcccaagtgagaatacatagattacccccagtgccctgaacagcactcggtcctaacacccgtgtccatggaaagcacgccgcgtctggagaaagaagcctggctttgtcacttactagccatgtgattttggaaagaaacttaacattaattccttcagctacaatggaattcttgggaggattaaatatggtgacaacgcctaatattagatggcctgtattccacactcaatcttccttccctcttcttccttctttgtagagctataatgaaaagtatcatgtgggacacagaagaggttgcagtctggggtctgcagggcttagcggccaggcagattagctttcttgaggaatcctgacagtgggtggaagggtatgatgatg

SEQ ID NO: 349 - DNA, 6 bp, Homo sapiens
gtaaga

SEQ ID NO: 350 - protein, 1163 aa, Homo sapiens
MVWCLGLAVLSLVISQGADGRGKPEVVSVVGRAEESVVLGCDLLPPAGRPPLHVIEWLRFGFLLPIFIQFGLYSPRIDPDYVGRVRLQKGASLQIEGLRVEDQGWYECRVFFLDQHIPEDDFANGSWVHLTVNSPPQFQETPPAVLEVQELEPVTLRCVARGSPLPHVTWKLRGKDLGQGQGQVQVQNGTLRIRRVERGSSGVYTCQASSTEGSATHATQLLVLGPPVIVVPPKNSTVNASQDVSLACHAEAYPANLTYSWFQDNINVFHISRLQPRVQILVDGSLRLLATQPDDAGCYTCVPSNGLLHPPSASAYLTVLCMPGVIRCPVRANPPLLFVSWTKDGKALQLDKFPGWSQGTEGSLIIALGNEDALGEYSCTPYNSLGTAGPSPVTRVLLKAPPAFIERPKEEYFQEVGRELLIPCSAQGDPPPVVSWTKVGRGLQGQAQVDSNSSLILRPLTKEAHGHWECSASNAVARVATSTNVYVLGTSPHVVTNVSVVALPKGANVSWEPGFDGGYLQRFSVWYTPLAKRPDRMHHDWVSLAVPVGAAHLLVPGLQPHTQYQFSVLAQNKLGSGPFSEIVLSAPEGLPTTPAAPGLPPTEIPPPLSPPRGLVAVRTPRGVLLHWDPPELVPKRLDGYVLEGRQGSQGWEVLDPAVAGTETELLVPGLIKDVLYEFRLVAFAGSFVSDPSNTANVSTSGLEVYPSRTQLPGLLPQPVLAGVVGGVCFLGVAVLVSILAGCLLNRRRAARRRRKRLRQDPPLIFSPTGKSAAPSALGSGSPDSVAKLKLQGSPVPSLRQSLLWGDPAGTPSPHPDPPSSRGPLPLEPICRGPDGRFVMGPTVAAPQERSGREQAEPRTPAQRLARSFDCSSSSPSGAPQPLCIEDISPVAPPPAAPPSPLPGPGPLLQYLSLPFFREMNVDGDWPPLEEPSPAAPPDYMDTRRCPTSSFLRSPETPPVSPRESLPGAVVGAGATAEPPYTALADWTLRERLLPGLLPAAPRGSLTSQSSGRGSASFLRPPSTAPSAGGSYLSPAPGDTSSWASGPERWPRREHVVTVSKRRNTSVDENYEWDSEFPGDMELLETLHLGLASSRLRPEAETELGVKTPEEGCLLNTAHVTGPEARCAALREEFLAFRRRRDATRARLPAYRQPVPHPEQATLL

SEQ ID NO: 351 - protein, 1163 aa, Homo sapiens; identical to SEQ ID NO: 350

SEQ ID NO: 352 - protein, 1189 aa, Homo sapiens
EGLGEQASWAMVWCLGLAVLSLVISQGADGRGKPEVVSVVGRAGESVVLGCDLLPPAGRPPLHVIEWLRFGFLLPIFIQFGLYSPRIDPDYVGRVRLQKGASLQIEGLRVEDQGWYECRVFFLDQHIPEDDFANGSWVHLTVNSPPQFQETPPAVLEVQELEPVTLRCVARGSPLPHVTWKLRGKDLGQGQGQVQVQNGTLRIRRVERGSSGVYTCQASSTEGSATHATQLLVLGPPVIVVPPKNSTVNASQDVSLACHAEAYPANLTYSWFQDNINVFHISRLQPRVRILVDGSLRLLATQPDDAGCYTCVPSNGLLHPPSASAYLTVLYPAQVTAMPPETPLPIGMPGVIRCPVRANPPLLFVSWTKDGKALQLDKFPGWSQGTEGSLIIALGNEDALGEYSCTPYNSLGTAGPSPVTRVLLKAPPAFIERPKEEYFQEVGRELLIPCSAQGDPPPVVSWTKVGRGLQGQAQVDSNSSLILRPLTKEAHGHWECSASNAVARVATSTNVYVLGTSPHVVTNVSVVALPKGANVSWEPGFDGGYLQRFSVWYTPLAKRPDRMHHDWVSLAVPVGAAHLLVPGLQPHTQYQFSVLAQNKLGSGPFSEIVLSAPEGLPTTPAAPGLPPTEIPPPLSPPRGLVAVRTPRGVLLHWDPPELVPKRLDGYVLEGRQGSQGWEVLDPAVAGTETELLVPGLIKDVLYEFRLVAFAGSFVSDPSNTANVSTSGLEVYPSRTQLPGLLPQPVLAGVVGGVCFLGVAVLVSILAGCLLNRRRAARRRRKRLRQDPPLIFSPTGKSAAPSALGSGSPDSVAKLKLQGSPVPSLRQSLLWGDPAGTPSPHPDPPSSRGPLPLEPICRGPDGRFVMGPTVAAPQERSGREQAEPRTPAQRLARSFDCSSSSPSGAPQPLCIEDISPVAPPPAAPPSPLPGPGPLLQYLSLPFFREMNVDGDWPPLEEPSPAAPPDYMDTRRCPTSSFLRSPETPPVSPRESLPGAVVGAGATAEPPYTALADWTLRERLLPGLLPAAPRGSLTSQSSGRGSASFLRPPSTAPSAGGSYLSPAPGDTSSWASGPERWPRREHVVTVSKRRNTSVDENYEWDSEFPGDMELLETLHLGLASSRLRPEAEPELGVKTPEEGCLLNTAHVTGPEARCAALREEFLAFRRRRDATRARLPAYRQPVPHPEQATLL

SEQ ID NO: 353 - protein, 325 aa, Homo sapiens
MGPTVAAPQERSGREQAEPRTPAQRLARSFDCSSSSPSGAPQPLCIEDISPVAPPPAAPPSPLPGPGPLLQYLSLPFFREMNVDGDWPPLEEPSPAAPPDYMDTRRCPTSSFLRSPETPPVSPRESLPGAVVGAGATAEPPYTALADWTLRERLLPGLLPAAPRGSLTSQSSGRGSASFLRPPSTAPSAGGSYLSPAPGDTSSWASGPERWPRREHVVTVSKRRNTSVDENYEWDSEFPGDMELLETLHLGLASSRLRPEAEPELGVKTPEEGCLLNTAHVTGPEARCAALREEFLAFRRRRDATRARLPAYRQPVPHPEQATLL

SEQ ID NO: 354 - protein, 152 aa, Homo sapiens; identical to SEQ ID NO: 153

SEQ ID NO: 355 - protein, 138 aa, Homo sapiens
MVWCLGLAVLSLVISQGADGRGKPEVVSVVGRAGESVVLGCDLLPPAGRPPLHVIEWLRFGFLLPIFIQFGLYSPRIDPDYVGKSSPQVGGREVSARKVGWVESHKASYERLCPCSDLISSSAALTLLNKHGCAPKQC

SEQ ID NO: 356 - DNA, 20 bp, Artificial Organism
  Synthetic oligonucleotide
tctccccaacaacaagctgg

SEQ ID NO: 357 - DNA, 21 bp, Artificial Organism
  Synthetic oligonucleotide
gagaggctagtgggagggatg

SEQ ID NO: 358 - DNA, 115 bp, Artificial Organism; identical to SEQ ID NO: 219
  Synthetic oligonucleotide

SEQ ID NO: 359 - DNA, 17 bp, Artificial Organism
  Synthetic oligonucleotide
aggggctgcatggcatg

SEQ ID NO: 360 - DNA, 25 bp, Artificial Organism
  Synthetic oligonucleotide
tatgtgggaagacagatacacaggc

SEQ ID NO: 361 - DNA, 110 bp, Artificial Organism; identical to SEQ ID NO: 222
  Synthetic oligonucleotide

SEQ ID NO: 362 - DNA, 19 bp, Artificial Organism
  Synthetic oligonucleotide
gaatcagcccaaagccagg

SEQ ID NO: 363 - DNA, 20 bp, Artificial Organism
  Synthetic oligonucleotide
gctggtgaaagcactgggtt

SEQ ID NO: 364 - DNA, 114 bp, Artificial Organism; identical to SEQ ID NO: 225
  Synthetic oligonucleotide

SEQ ID NO: 365 - DNA, 21 bp, Artificial Organism
  Synthetic oligonucleotide
cattctccacgcatcagatga

SEQ ID NO: 366 - DNA, 20 bp, Artificial Organism
  Synthetic oligonucleotide
accatcagattggcagcatg

SEQ ID NO: 367 - DNA, 114 bp, Artificial Organism; identical to SEQ ID NO: 228
  Synthetic oligonucleotide

SEQ ID NO: 368 - DNA, 24 bp, Artificial Organism
  Synthetic oligonucleotide
tggagattcctggtttaaagcatt

SEQ ID NO: 369 - DNA, 20 bp, Artificial Organism
  Synthetic oligonucleotide
ccccagcttagagctgcact

SEQ ID NO: 370 - DNA, 105 bp, Artificial Organism; identical to SEQ ID NO: 231
  Synthetic oligonucleotide

SEQ ID NO: 371 - DNA, 19 bp, Artificial Organism
  Synthetic oligonucleotide
ctactccctcggcacaggc

SEQ ID NO: 372 - DNA, 20 bp, Artificial Organism
  Synthetic oligonucleotide
cagcagcactgtcatccagc

SEQ ID NO: 373 - DNA, 101 bp, Artificial Organism; identical to SEQ ID NO: 234
  Synthetic oligonucleotide

SEQ ID NO: 374 - DNA, 21 bp, Artificial Organism
  Synthetic oligonucleotide
acgaggaactggaagctcagc

SEQ ID NO: 375 - DNA, 22 bp, Artificial Organism
  Synthetic oligonucleotide
aatgtggcattatggagcagtg

SEQ ID NO: 376 - DNA, 110 bp, Artificial Organism; identical to SEQ ID NO: 237
  Synthetic oligonucleotide

SEQ ID NO: 377 - DNA, 19 bp, Artificial Organism
  Synthetic oligonucleotide
gtccctgcttcccatccct

SEQ ID NO: 378 - DNA, 22 bp, Artificial Organism
  Synthetic oligonucleotide
cttgcaaacacaggcttcattc

SEQ ID NO: 379 - DNA, 96 bp, Artificial Organism; identical to SEQ ID NO: 117
  Synthetic oligonucleotide

SEQ ID NO: 380 - DNA, 27 bp, Artificial Organism
  Synthetic oligonucleotide
aaagatcactgaactgggaactaagat

SEQ ID NO: 381 - DNA, 20 bp, Artificial Organism
  Synthetic oligonucleotide
ggtcctattcccatgccatg

SEQ ID NO: 382 - DNA, 101 bp, Artificial Organism; identical to SEQ ID NO: 243
  Synthetic oligonucleotide

SEQ ID NO: 383 - DNA, 20 bp, Artificial Organism
  Synthetic oligonucleotide
ttctgcaaactttgcccagc

SEQ ID NO: 384 - DNA, 26 bp, Artificial Organism
  Synthetic oligonucleotide
ccatttgtacatgagttgtgtctgag

SEQ ID NO: 385 - DNA, 103 bp, Artificial Organism
  Synthetic oligonucleotide
ttctgcaaactttgcccagccaactcttattcaaataaaggagaaacttcttgccaccagtgtgaccctgacaaatactcagacacaactcatgtacaaatgg

SEQ ID NO: 386 - DNA, 26 bp, Artificial Organism
  Synthetic oligonucleotide
gaaggctcttgtcacttactagccat

SEQ ID NO: 387 - DNA, 24 bp, Artificial Organism
  Synthetic oligonucleotide
tgtcaccatatttaatcctcccaa

SEQ ID NO: 388 - DNA, 101 bp, Artificial Organism; identical to SEQ ID NO: 267
  Synthetic oligonucleotide

SEQ ID NO: 389 - DNA, 20 bp, Artificial Organism
  Synthetic oligonucleotide
cctgctgtgttggaagtgca

SEQ ID NO: 390 - DNA, 20 bp, Artificial Organism
  Synthetic oligonucleotide
aaggtcctttcctcggagct

SEQ ID NO: 391 - DNA, 105 bp, Artificial Organism; identical to SEQ ID NO: 270
  Synthetic oligonucleotide

SEQ ID NO: 392 - DNA, 24 bp, Artificial Organism
  Synthetic oligonucleotide
gtaagagttctcctcaggtgggag

SEQ ID NO: 393 - DNA, 22 bp, Artificial Organism
  Synthetic oligonucleotide
ttaaggcagcagagctggagat

SEQ ID NO: 394 - DNA, 129 bp, Artificial Organism
  Synthetic oligonucleotide
gtaagagttctcctcaggtgggaggtagggaggtatcagcaagaaaggtgggctgggtagagtcgcacaaggcctcctatgaacggctttgtccctgctctgatctcatctccagctctgctgccttaa

SEQ ID NO: 395 - DNA, 19 bp, Artificial Organism
  Synthetic oligonucleotide
ctgcagctctggcagaacc

SEQ ID NO: 396 - DNA, 21 bp, Artificial Organism
  Synthetic oligonucleotide
cccaccctgaagacactcctc

SEQ ID NO: 397 - DNA, 102 bp, Artificial Organism; identical to SEQ ID NO: 251
  Synthetic oligonucleotide

SEQ ID NO: 398 - DNA, 20 bp, Artificial Organism
  Synthetic oligonucleotide
aatgcaatgcgactgcaaaa

SEQ ID NO: 399 - DNA, 25 bp, Artificial Organism
  Synthetic oligonucleotide
catttctcatgctttaagtggaagc

SEQ ID NO: 400 - DNA, 101 bp, Artificial Organism; identical to SEQ ID NO: 254
  Synthetic oligonucleotide

SEQ ID NO: 401 - DNA, 20 bp, Artificial Organism
  Synthetic oligonucleotide
gcgaaacgcgatttgttgtt

SEQ ID NO: 402 - DNA, 19 bp, Artificial Organism
  Synthetic oligonucleotide
catctggaggagggaggga

SEQ ID NO: 403 - DNA, 153 bp, Artificial Organism; identical to SEQ ID NO: 262
  Synthetic oligonucleotide

SEQ ID NO: 404 - DNA, 19 bp, Artificial Organism
  Synthetic oligonucleotide
ccccagttcactttcgcct

SEQ ID NO: 405 - DNA, 19 bp, Artificial Organism
  Synthetic oligonucleotide
tctgatcacaccgccgtct

SEQ ID NO: 406 - DNA, 104 bp, Artificial Organism; identical to SEQ ID NO: 273
  Synthetic oligonucleotide

SEQ ID NO: 407 - DNA, 24 bp, Artificial Organism
  Synthetic oligonucleotide
cccagagcttctgctagaatcttc

SEQ ID NO: 408 - DNA, 21 bp, Artificial Organism
  Synthetic oligonucleotide
actgacttactccccttgggc

SEQ ID NO: 409 - DNA, 102 bp, Artificial Organism; identical to SEQ ID NO: 276
  Synthetic oligonucleotide

SEQ ID NO: 410 - DNA, 21 bp, Artificial Organism
  Synthetic oligonucleotide
gagcaccaagcaccagaatca

SEQ ID NO: 411 - DNA, 22 bp, Artificial Organism
  Synthetic oligonucleotide
tgggaaaccttcttctctccag

SEQ ID NO: 412 - DNA, 100 bp, Artificial Organism; identical to SEQ ID NO: 279
  Synthetic oligonucleotide

SEQ ID NO: 413 - DNA, 19 bp, Artificial Organism
  Synthetic oligonucleotide
agactccaacccacagccc

SEQ ID NO: 414 - DNA, 19 bp, Artificial Organism
  Synthetic oligonucleotide
cagctcagccaaccttgca

SEQ ID NO: 415 - DNA, 138 bp, Artificial Organism; identical to SEQ ID NO: 285
  Synthetic oligonucleotide

SEQ ID NO: 416 - DNA, 18 bp, Artificial Organism
  Synthetic oligonucleotide
gtacctgagccctgccct

SEQ ID NO: 417 - DNA, 19 bp, Artificial Organism
  Synthetic oligonucleotide
ctcaagctgttcctggcga

SEQ ID NO: 418 - DNA, 99 bp, Artificial Organism; identical to SEQ ID NO: 288
  Synthetic oligonucleotide

SEQ ID NO: 419 - DNA, 101 bp, Artificial Organism
  Synthetic oligonucleotide
acagtttttacttggaaccagccttctgccaagagtctcagtttggttgtgtactcctacaactactatttttggcttgacttccctctccagctcccagt

SEQ ID NO: 420 - DNA, 193 bp, Artificial Organism; identical to SEQ ID NO: 95
  Synthetic oligonucleotide

SEQ ID NO: 421 - DNA, 4961 bp, Homo sapiens
tgggaacaaacttcagaaggaggagagacaccgggcccagggcaccctcgcgggcggacccaagcagtgagggcctgcagccggccggccagggcagcggcaggcgcggcccggacctacgggaggaagccccgagccctcggcgggctgcgagcgactccccggcgatgcctcacaactccatcagatctggccatggagggctgaaccagctgggaggggcctttgtgaatggcagacctctgccggaagtggtccgccagcgcatcgtagacctggcccaccagggtgtaaggccctgcgacatctctcgccagctccgcgtcagccatggctgcgtcagcaagatccttggcaggtactacgagactggcagcatccggcctggagtgatagggggctccaagcccaaggtggccacccccaaggtggtggagaagattggggactacaaacgccagaaccctaccatgtttgcctgggagatccgagaccggctcctggctgagggcgtctgtgacaatgacactgtgcccagtgtcagctccattaatagaatcatccggaccaaagtgcagcaaccattcaacctccctatggacagctgcgtggccaccaagtccctgagtcccggacacacgctgatccccagctcagctgtaactcccccggagtcaccccagtcggattccctgggctccacctactccatcaatgggctcctgggcatcgctcagcctggcagcgacaagaggaaaatggatgacagtgatcaggatagctgccgactaagcattgactcacagagcagcagcagcggaccccgaaagcaccttcgcacggatgccttcagccagcaccacctcgagccgctcgagtgcccatttgagcggcagcactacccagaggcctatgcctcccccagccacaccaaaggcgagcaggtgagaagctgggccctgggaggtgaacagggtgggcaagggccagagaaggtctattctccaaatgagcctgtgctccatcaaagcagctggaagttgcatcaatgggctcagggcacctgccttatgcaactccaagcctgacacatgctttattttaccagatgccctggcatcttcctccctttctaaccctcctggcttccttcacccaaaacctttgagcctgggcctttcagggatggcagcacaacctgatgatgctatcccttgccatcagcgtctttcccagattgcaacatcacgttccacaactctgaagcagtagcacaaagccttcacataatgacctcagccactatttcctagccccacctttggccactcatcctgcacaccccatgctcttgcattactcatggccccgagctcaccaccctcgctcacacctctctgcccttgcacactgtgtgccctccacacagaatgcctttcctcccacttctctgcatggaaaaataccactagccttcatgactcagccaaacatcaccctctccgtcagtcctcccctgcccctccgacatgaatcatctctcctgcctcttgcccttctgcatgtcccacatgctgctctcagtagcttctcacagtgtcacttaataatctagcagacagacaggtacaaagacacgcggactccttaaggacagggaagcctcatgaaacgttaaacatcgtttttattcccagcacctaccattgtgccccccttataatagacagtaatggtatagtgaatgaatgaacaaatgaatgagttgagaaatccagaataatacatcacaagctacagcgaatttttcttgctagtgctcaggacaggtgaaatgaatcataacaggttggtgtctgtgaaaagctgacagagatgtgagaggtcccaccctgaggccaacaaagactctgcagctctggcagaaccactaagctctcagctcctagtcatcacatctttttcccttaaccctgccaagtcaaccagatgaggagtgtcttcagggtgggtctgttgcccctctttgcccatgccgtcatttgctgtaggagtgaggcaagtccatatgcctttaagaaccgagtaggacaatggagatgatgccaataatcagcccaaccacttccagtgaccgtctgggctgctggtcccgtgccagcactcgcagctgggcaggcaatctgcatcagcaattttatcagcgttgactgtggcaaccacgagcgtgcagagaaagctgaccatcagcagcatggggagagggcctggggtgctcacgcaccagtcagcacacagctccaggaaggaaaggggttgcagtggggggcctgcaggaagctcactctgtgagagtaagcctgcaaaactcagtgtgcaggcaccagccactcagtgaaagtaaagaaaccctgctgatgagactctggacacccgctgagtcccagagccatttcctggctccatccctaagccccccaaaggaccctgcttgactacagagcacccccatgccatgctggcatatgaacatggggaatcctggaatgagaaagtctttgagctttcagggacctccatgaccaccttgtccagtttctccatttgtgtggagataatccaagcaagacaaggagggcttgggcaatcagaaggttttggagctcaggcctgccaaccctcatttcattcagactggtccactgtcacctgtttcagatatggtgcttctacgtaaacacttatttgaagactgaaaaaaaaagcatttgaaaaccattaaacttctccaaccactcatctttcagatgaggagactgaggtccagcagtgtccataaattattcattacctcctcagtcaatcattattcacccagtcattcacctggagggtggtgaaggcagggagaaccagccagtgcaagggcccctcatgtcctgcctggcctttgcttttcctacctctggtaactgactgtgctgccaaagtaacactccgtgctctctcacctgggcataggaatgccctctggcttggggagccaagaaagaagcacaagtattcatacctgaccttaggacaggttgtaacacagctatcttttctgcaaaatcaacaagtgggggaccaggcatggtggctcacacctgtagtcccagcactttgggaggccaaggtggatgggtcacctgaggtcaggagtttgagaccagcctggccaacaaggcaaaatcccatctctactaaaaatataaaaattagccaggcctggtggcgtgcacctgtaatcctagctactcgggaggctgagacaggagaatcgcttgaagctggggggcggaggttgcagtgacccgagattgtgccactgcactccagcctgggtgacagagcgaggctccatctgaaaaaaaaaaaaaaagggcagggggaagtgttcatcagaaacatcatgtggccttattcctggttgctatttcatgaccagacatagctagaagtcatacagctcttgtttccctattttacaaatgcatcaaaaaaaatcaacagaatatgaatatcagtttattgacagaaatcaagaatttggtggcttctgactcttcacgattctgaaataatatctgtgataactctcattgggcatctgctgtcaccaagtattcggtgctaagcacattatgtataagtatacaaaatttcatgtaatgcttacgtcagcctcataaagtagagtctatgattcccatacaggtgagaaaattaaggttcagagcagtcaagtagactaaagctacttggcaggtcattgcagaaccagggctcagagtcgctgaagttctgaagcattgtgctgctctgccccgattcaagttcaattccagctaaaaagcccaataatcactgggaagtttcagtcattgaatacaaaatcaccaaaagatttgactatataggttttctttttcctttttttctaagttacttggattttgaaatagctataggattctgagtagatattttgctgtcaaaacaacacatccataaagcattttaaacttctcttatacgctctagaaattaggtattttgttcaatttcaataagacacaccctggccaggtgcaacggctcatgcctgtaatcccaacactttgggaggtcaagccaggcagatcatgaggtcaggagtttaagactagcctggccaacatggtgaaactcctgtctctactaaagatacaaaaaattagcctggcatggtagcacgcacctgtaatccctgctactcgggaggctgaggcaggggaatcacttgaacccaggaagcagaggttgcagtaagcgaagatcgcaccattgcactccagcttgggcaacaagagcaaaactccatctacaaaaaaaaaaaaaaaaaaaggccctaagcaactccaccctgcctctaagtgggcccccttggaaggcatggaaccagagcaccatttagtcaataattgctgctatgtgctaatggtgccctggtggcctccagaattgactgcagcttccaaaagtgcccagcatgcaaccggaaagtgctgtggatctttgcagaacccagctcgatggaaatcactgaaaacaattgcctttagtggcactgttatgtaactactgagcattccctgaattcagctttgcacatctcacgtagcaggtatgtgacgagtgtgaaggtatgtggggaatgggtgtgttcttttttctgcgctatctgcttccccagtggaaggaggccatggtgaggatgaggtacacttacctttagttaaacaagttcttttcggaaggagtacctaaggtcatagctgtgctcctgggaaggggaggccaggaggcatctaaaatgaggtcttactgatgaagacccccaggtacttgacaaagagtgtttccaacaaaaacaactc

SEQ ID NO: 422 - protein, 450 aa, Homo sapiens; identical to SEQ ID NO: 172

SEQ ID NO: 423 - protein, 342 aa, Homo sapiens
MTCPRNVTPNSYAEPLAAPGGGERYSRSAGMYMQSGSDFNCGVMRGCGLAPSLSKRDEGSSPSLALNTYPSYLSQLDSWGDPKAAYRLEQPVGRPLSSCSYPPSVKEENVCCMYSAEKRAKSGPEAALYSHPLPESCLGEHEVPVPSYYRASPSYSALDKTPHCSGANDFEAPFEQRASLNPRAEHLESPQLGGKVSFPETPKSDSQTPSPNEIKTEQSLAGPKGSPSESEKERAKAADSSPDTSDNEAKEEIKAENTTGNWLTAKSGRKKRCPYTKHQTLELEKEFLFNMYLTRERRLEISKTINLTDRQVKIWFQNRRMKLKKMNRENRIRELTSNFNFT

SEQ ID NO: 424 - protein, 1361 aa, Homo sapiens
MGAAGRQDFLFKAMLTISWLTLTCFPGATSTVAAGCPDQSPELQPWNPGHDQDHHVHIGQGKTLLLTSSATVYSIHISEGGKLVIKDHDEPIVLRTRHILIDNGGELHAGSALCPFQGNFTIILYGRADEGIQPDPYYGLKYIGVGKGGALELHGQKKLSWTFLNKTLHPGGMAEGGYFFERSWGHRGVIVHVIDPKSGTVIHSDRFDTYRSKKESERLVQYLNAVPDGRILSVAVNDEGSRNLDDMARKAMTKLGSKHFLHLGFRHPWSFLTVKGNPSSSVEDHIEYHGHRGSAAARVFKLFQTEHGEYFNVSLSSEWVQDVEWTEWFDHDKVSQTKGGEKISDLWKAHPGKICNRPIDIQATTMDGVNLSTEVVYKKGQDYRFACYDRGRACRSYRVRFLCGKPVRPKLTVTIDTNVNSTILNLEDNVQSWKPGDTLVIASTDYSMYQAEEFQVLPCRSCAPNQVKVAGKPMYLHIGEEIDGVDMRAEVGLLSRNIIVMGEMEDKCYPYRNHICNFFDFDTFGGHIKFALGFKAAHLEGTELKHMGQQLVGQYPIHFHLAGDVDERGGYDPPTYIRDLSIHHTFSRCVTVHGSNGLLIKDVVGYNSLGHCFFTEDGPEERNTFDHCLGLLVKSGTLLPSDRDSKMCKMITEDSYPGYIPKPRQDCNAVSTFWMANPNNNLINCAAAGSEETGFWFIFHHVPTGPSVGMYSPGYSEHIPLGKFYNNRAHSNYRAGMIIDNGVKTTEASAKDKRPFLSIISARYSPHQDADPLKPREPAIIRHFIAYKNQDHGAWLRGGDVWLDSCRFADNGIGLTLASGGTFPYDDGSKQEIKNSLFVGESGNVGTEMMDNRIWGPGGLDHSGRTLPIGQNFPIRGIQLYDGPINIQNCTFRKFVALEGRHTSALAFRLNNAWQSCPHNNVTGIAFEDVPITSRVFFGEPGPWFNQLDMDGDKTSVFHDVDGSVSEYPGSYLTKNDNWLVRHPDCINVPDWRGAICSGCYAQMYIQAYKTSNLRMKIIKNDFPSHPLYLEGALTRSTHYQQYQPVVTLQKGYTIHWDQTAPAELAIWLINFNKGDWIRVGLCYPRGTTFSILSDVHNRLLKQTSKTGVFVRTLQMDKVEQSYPGRSHYYWDEDSGLLFLKLKAQNEREKFAFCSMKGCERIKIKALIPKNAGVSDCTATAYPKFTERAVVDVPMPKKLFGSQLKTKDHFLEVKMESSKQHFFHLWNDFAYIEVDGKKYPSSEDGIQVVVIDGNQGRVVSHTSFRNSILQGIPWQLFNYVATIPDNSIVLMASKGRYVSRGPWTRVLEKLGADRGLKLKEQMAFVGFKGSFRPIWVTLDTEDHKAKIFQVVPIPVVKKKKL

SEQ ID NO: 425 - protein, 181 aa, Homo sapiens; identical to SEQ ID NO: 205

SEQ ID NO: 426 - protein, 778 aa, Homo sapiens
MTTRQATKDPLLRGVSPTPSKIPVRSQKRTPFPTVTSCAVDQENQDPRRWVQKPPLNIQRPLVDSAGPRPKARHQAETSQRLVGISQPRNPLEELRPSPRGQNVGPGPPAQTEAPGTIEFVADPAALATILSGEGVKSCHLGRQPSLAKRVLVRGSQGGTTQRVQGVRASAYLAPRTPTHRLDPARASCFSRLEGPGPRGRTLCPQRLQALISPSGPSFHPSTHPSFQELRRETAGSSRTSVSQASGLLLETPVQPAFSLPKGEREVVTHSDEGGVASLGLAQRVPLRENREMSHTRDSHDSHLMPSPAPVAQPLPGHVVPCPSPFGRAQRVPSPGPPTLTSYSVLRRLTVQPKTRFTPMPSTPRVQQAQWLRGVSPQSCSEDPALPWEQVAVRLFDQESCIRSLEGSGKPPVATPSGPHSNRTPSLQEVKIQRIGILQQLLRQEVEGLVGGQCVPLNGGSSLDMVELQPLLTEISRTLNATEHNSGTSHLPGLLKHSGLPKPCLPEECGEPQPCPPAEPGPPEAFCRSEPEIPEPSLQEQLEVPEPYPPAEPRPLESCCRSEPEIPESSRQEQLEVPEPCPPAEPRPLESYCRIEPEIPESSRQEQLEVPEPCPPAEPGPLQPSTQGQSGPPGPCPRVELGASEPCTLEHRSLESSLPPCCSQWAPATTSLIFSSQHPLCASPPICSLQSLRPPAGQAGLSNLAPRTLALRERLKSCLTAIHCFHEARLDDECAFYTSRAPPSGPTRVCTNPVATLLEWQDALCFIPVGSAAPQGSP

SEQ ID NO: 427 - protein, 1070 aa, Homo sapiens
MGAARGSPARPRRLPLLSVLLLPLLGGTQTAIVFIKQPSSQDALQGRRALLRCEVEAPGPVHVYWLLDGAPVQDTERRFAQGSSLSFAAVDRLQDSGTFQCVARDDVTGEEARSANASFNIKWIEAGPVVLKHPASEAEIQPQTQVTLRCHIDGHPRPTYQWFRDGTPLSDGQSNHTVSSKERNLTLRPAGPEHSGLYSCCAHSAFGQACSSQNFTLSIADESFARVVLAPQDVVVARYEEAMFHCQFSAQPPPSLQWLFEDETPITNRSRPPHLRRATVFANGSLLLTQVRPRNAGIYRCIGQGQRGPPIILEATLHLAEIEDMPLFEPRVFTAGSEERVTCLPPKGLPEPSVWWEHAGVRLPTHGRVYQKGHELVLANIAESDAGVYTCHAANLAGQRRQDVNITVATVPSWLKKPQDSQLEEGKPGYLDCLTQATPKPTVVWYRNQMLISEDSRFEVFKNGTLRINSVEVYDGTWYRCMSSTPAGSIEAQARVQVLEKLKFTPPPQPQQCMEFDKEATVPCSATGREKPTIKWERADGSSLPEWVTDNAGTLHFARVTRDDAGNYTCIASNGPQGQIRAHVQLTVAVFITFKVEPERTTVYQGHTALLQCEAQGDPKPLIQWKGKDRILDPTKLGPRMHIFQNGSLVIHDVAPEDSGRYTCIAGNSCNIKHTEAPLYVVDKPVPEESEGPGSPPPYKMIQTIGLSVGAAVAYIIAVLGLMFYCKKRCKAKRLQKQPEGEEPEMECLNGGPLQNGQPSAEIQEEVALTSLGSGPAATNKRHSTSDKMHFPRSSLQPITTLGKSEFGEVFLAKAQGLEEGVAETLVLVKSLQSKDEQQQLDFRRELEMFGKLNHANVVRLLGLCREAEPHYMVLEYVDLGDLKQFLRISKSKDEKLKSQPLSTKQKVALCTQVALGMEHLSNNRFVHKDLAARNCLVSAQRQVKVSALGLSKDVYNSEYYHFRQAWVPLRWMSPEAILEGDFSTKSDVWAFGVLMWEVFTHGEMPHGGQADDEVLADLQAGKARLPQPEGCPSKLYRLMQRCWALSPKDRPSFSEIASALGDSTVDSKP

SEQ ID NO: 428 - protein, 746 aa, Homo sapiens
MGQTGKKSEKGPVCWRKRVKSEYMRLRQLKRFRRADEVKSMFSSNRQKILERTEILNQEWKQRRIQPVHILTSVSSLRGTRECSVTSDLDFPTQVIPLKTLNAVASVPIMYSWSPLQQNFMVEDETVLHNIPYMGDEVLDQDGTFIEELIKNYDGKVHGDRECGFINDEIFVELVNALGQYNDDDDDDDGDDPEEREEKQKDLEDHRDDKESRPPRKFPSDKIFEAISSMFPDKGTAEELKEKYKELTEQQLPGALPPECTPNIDGPNAKSVQREQSLHSFHTLFCRRCFKYDCFLHPFHATPNTYKRKNTETALDNKPCGPQCYQHLEGAKEFAAALTAERIKTPPKRPGGRRRGRLPNNSSRPSTPTINVLESKDTDSDREAGTETGGENNDKEEEEKKDETSSSSEANSRCQTPIKMKPNIEPPENVEWSGAEASMFRVLIGTYYDNFCAIARLIGTKTCRQVYEFRVKESSIIAPAPAEDVDTPPRKKKRKHRLWAAHCRKIQLKKDGSSNHVYNYQPCDHPRQPCDSSCPCVIAQNFCEKFCQCSSECQNRFPGCRCKAQCNTKQCPCYLAVRECDPDLCLTCGAADHWDSKNVSCKNCSIQRGSKKHLLLAPSDVAGWGIFIKDPVQKNEFISEYCGEIISQDEADRRGKVYDKYMCSFLFNLNNDFVVDATRKGNKIRFANHSVNPNCYAKVMMVNGDHRIGIFAKRAIQTGEELFFDYRYSQADALKYVGIEREMEIP

SEQ ID NO: 429 - protein, 505 aa, Homo sapiens [sequence omitted]

SEQ ID NO: 430 - DNA, 21 bp, Homo sapiens
gagaggctagtgggagggatg

SEQ ID NO: 431 - protein, 313 aa, Homo sapiens; identical to SEQ ID NO: 73

SEQ ID NO: 432 - DNA, 405 bp, Homo sapiens
actactgttttttttctcttttgagtgggggtctcactctatcacccaggctggagtacaatgtcacaatctcagctcactgcaacctccgcctcccaggctcaagtgatcctcccaggagttcaaggctgcagtgagctgtgatcacaccactgtcctccggcctgcatcacagagctagaccttgtctcttgccataaacaaataggagtttatttttttctcacactctgagtctggaagcaggtgctgctgctgtgggtccaggggctggcatctccgtggttctcttgactgtcattcccactggtgcttcacggctgcaaggtggctgccacagctctgggcattgcctccaccatccgggactgctgttctgtctccaccatcagactggcagcatgc

SEQ ID NO: 433 - DNA, 2305 bp, Homo sapiens
gttactgtcccgcgaacccacatccctacaaagcaggaaagtatgcttgggagaggccaagtgagtggggaatcagcccaaagccaggcgtccagggtctccctcacctgaagctgactttttccccaccttggacagagggcgggagatgccatccccactgaacccagtgctttcaccagccatattagctcccactcaccccccgtcgtggaagcctcggccgtcacacctgcagggccggggcgtgcatggcctcagggatggcctgttcagctgctgggtgactcgggtccaggtgcctcaccacctgctgagctctgtgtgatttctggacacttctgctcgttgcctttgggctcagtgaagagtctggagtttatctggagtgaggtggccggttcttggtgggatctgagcaggacagcgtctggctccttccctcggctcatggccctcagaatctgcgtcacatacaccccagctctcccgataggtctctgcactcgctgttgcctctgcctggaacagtctccctcctggtgtcattgtctccgtggtgtgtccttcctgaccttccacctccaccagtctgtcccccttggggacagggactcgttgctcatgttcacccggcaggctggacacttcgtggagggctccaaagccggcagatcccggggccgcctctgtctctcccaggccctgcgtgttgcggtgagaggagcatttgtgtctctgtggtttgctgctggagctggtgaccgggagagaaacaagggagacaagggtgcccagacaggtgcggggctcagccaggaggcagaagacgtggacgtgtcccgggccaggagggtcacagatgcaccacaaggcactctgtgtggcactgggaacaggaattctgggagtcagtctgcaagggtggtgggcgttgctcacctgggagaagcctttagagtgggcgttgagcaggccattagctcgtgccctgaggaggtgcatgggcggcatgggctctccatggaaattatgtgggcgcgaatggatgtggctctgcgctcacctgggcgaggacttctggccggtgccggggcactctgcatgaccctggcagaatcgagctgccctgactatgaaaggggaagaagagcatgcctgaccctccaccggcaccccacccctcactgctccacctggggcctgcctctgcgggtggctgggtcctggctgactgttgtgactgttgaggccctgggggggtggcgcatgggagttaggaggactggccaggtggggcccactatgcacccacccccagtgtcaggtgcttctcctctcctcctccaccacctcctcctcctcctcctcatcatcatcctcacttgttgaggacgtcctgtgtgccaagtggtttatatgcccagcctcatttaatcctcagaatgactccatgaggtagctactaaaaccccccacttaacagatgaggaaactgaggcctagagaagctcaacaagttgcctaagttccaagtttcctctcccaactctcctaccctctcctcttccttctcctttctcccattcttccctgcctcttccctaactagacaattttttattgagtgtctcccaggtgcaggcatgagccaggtgctgggaaaatcatgataacccagctccttctggtcattttctcagctggttagaggctgggaggacacgcaagttcagctccagccgactggggcattggtggtagcccctggagacattgtgcaatggggctacgaggctgcatctggctccagggaagcgtgttgcaatccatgagtgatgtctgccatgcgtacaggcatggagagtgaggcgcctgtactgtctttctgtagaccctagactggtggggcctctgaaatgcatccagacactgtgctgggtgtgttgcatggccctcccaaccaattcagtatttttctccccattttccagggagaaatctaaggcgtcagaatgtaaggttcttattggaacccaggctccagggtccctggttttctgtgacatcatgctgcaggaccctgtttctctctttgctttggctgctggggagctcagaagggagctttaggcttgctctcagtcaccacattagctcaggggtttgggcatttttgtcgccgtctcctttgggctctgtctcctccctgctgtgcttcctgaggagcaggccggatgtaagttatcaactataaataaaaccaagacttccgttctggctctcaaaaaaaaaaaaaaaaaaa

SEQ ID NO: 434 - protein, 313 aa, Homo sapiens; identical to SEQ ID NO: 73

SEQ ID NO: 435 - DNA, 401 bp, Homo sapiens
  misc_feature (394)..(394): n is a, c, g, or t
gtccagtctaccatcctgctgcagtcagtgggctccagcaaccaccagcctgatcttctcttcccaacacccgctttgtgccagcccccctatctgctcactccagtctttgagacccccagcaggccaggcaggtaaggagttggctgggaaggagtgtgaacacaagaggtcctcacctcactgtgagctgcacacctgccctgcccctaccccagggcaatctcatgcttccacaccttccaccctgggcccagctgggttctcccttagggaagaggggaggggctgcacttccagccctgtggttcctaattgggttgggcgttgggtgggggggagggagggagagggacagttacatgggtgggaagttttagggacccccagaacntcccttt

SEQ ID NO: 436 - DNA, 2561 bp, Homo sapiens
cgccaggaacagcttgaggtacctgagccctgccctccagcagcacccgagagggtcaggagaaaagcggaggaagctgggtaggccctgaggggcctcggtaagccatcatgaccacccggcaagccacgaaggatcccctcctccggggtgtatctcctacccctagcaagattccggtacgctctcagaaacgcacgcctttccccactgttacatcgtgcgccgtggaccaggagaaccaagatccaaggagatgggtgcagaaaccaccgctcaatattcaacgccccctcgttgattcagcaggccccaggccgaaagccaggcaccaggcagagacatcacaaagattggtggggatcagtcagcctcggaaccccttggaagagctcaggcctagccctaggggtcaaaatgtggggcctgggccccctgcccagacagaggctccagggaccatagagtttgtggctgaccctgcagccctggccaccatcctgtcaggtgagggtgtgaagagctgtcacctggggcgccagcctagtctggctaaaagagtactggttcgaggaagtcagggaggcaccacccagagggtccagggtgttcgggcctctgcatatttggcccccagaacccccacccaccgactggaccctgccagggcttcctgcttctctaggctggagggaccaggacctcgaggccggacattgtgcccccagaggctacaggctctgatttcaccttcaggaccttcctttcacccttccactcaccccagtttccaggagctaagaagggagacagctggcagcagccggacttcagtgagccaggcctcaggattgctcctggagaccccagtccagcctgctttctctcttcctaaaggagaacgcgaggttgtcactcactcagatgaaggaggtgtggcctctcttggtctggcccagcgagtaccattaagagaaaaccgagaaatgtcacataccagggacagccatgactcccacctgatgccctcccctgcccctgtggcccagcccttgcctggccatgtggtgccatgtccatcaccctttggacgggctcagcgtgtaccctccccaggccctccaactctgacctcatattcagtgttgcggcgtctcaccgttcaacctaaaacccggttcacacccatgccatcaacccccagagttcagcaggcccagtggctgcgtggtgtctcccctcagtcctgctctgaagatcctgccctgccctgggagcaggttgccgtccggttgtttgaccaggagagttgtataaggtcactggagggttctgggaaaccaccggtggccactccttctggaccccactctaacagaacccccagcctccaggaggtgaagattcaacgcatcggtatcctgcaacagctgttgagacaggaagtagaggggctggtagggggccagtgtgtccctcttaatggaggctcttctctggatatggttgaacttcagcccctgctgactgagatttctagaactctgaatgccacagagcataactctgggacttcccaccttcctggactgttaaaacactcagggctgccaaagccctgtcttccagaggagtgcggggaaccacagccctgccctccggcagagcctgggcccccagaggccttctgtaggagtgagcctgagataccagagccctccctccaggaacagcttgaagtaccagagccctaccctccagcagaacccaggcccctagagtcctgctgtaggagtgagcctgagataccggagtcctctcgccaggaacagcttgaggtacctgagccctgccctccagcagaacccaggcccctagagtcctactgtaggattgagcctgagataccggagtcctctcgccaggaacagcttgaggtacctgagccctgccctccagcagaacccgggccccttcagcccagcacccaggggcagtctggacccccagggccctgccctagggtagagctgggggcatcagagccctgcaccctggaacatagaagtctagagtccagtctaccaccctgctgcagtcagtgggctccagcaaccaccagcctgatcttctcttcccaacacccgctttgtgccagcccccctatctgctcactccagtctttgagacccccagcaggccaggcaggcctcagcaatctggcccctcgaaccctagccctgagggagcgcctcaaatcgtgtttaaccgccatccactgcttccacgaggctcgtctggacgatgagtgtgccttttacaccagccgagcccctccctcaggccccacccgggtctgcaccaaccctgtggctacattactcgaatggcaggatgccctgtgtttcattccagttggttctgctgccccccagggctctccatgatgagacaaccactcctgccctgccgtacttcttccttttagcccttatttattgtcggtctgcccatgggactgggagccgcccacttttgtcctcaataaagtttctaaagta

SEQ ID NO: 437 - protein, 778 aa, Homo sapiens; identical to SEQ ID NO: 426

SEQ ID NO: 438 - DNA, 435 bp, Homo sapiens
atgaccacccggcaagccacgaaggatcccctcctccggggtgtatctcctacccctagcaagattccggtacgctctcagaaacgcacgcctttccccactgttacatcgtgcgccgtggaccaggagaaccaagatccaaggagatgggtgcagaaaccaccgctcaatattcaacgccccctcgttgattcagcaggccccaggccgaaagccaggcaccaggcagagacatcacaaagattggtggggatcagtcagcctcggaaccccttggaagagctcaggcctagccctaggggtcaaaatgtggggcctgggccccctgcccagacagtcctggtcccagctcctggaaagctctttgctcttagaagatctccctttcctccagcaaaatgtcatctcgccaggtgccatggcttgtacctgtaa

SEQ ID NO: 439 - protein, 144 aa, Homo sapiens
MTTRQATKDPLLRGVSPTPSKIPVRSQKRTPFPTVTSCAVDQENQDPRRWVQKPPLNIQRPLVDSAGPRPKARHQAETSQRLVGISQPRNPLEELRPSPRGQNVGPGPPAQTVLVPAPGKLFALRRSPFPPAKCHLARCHGLYL

SEQ ID NO: 440 - DNA, 2816 bp, Homo sapiens
aggggttaccccttccatcttaagcaggatattctaggatctctcagtctcacagccttgcccaccaataaccagcagaaagcggttcgacaattggtccttcttttggcccctcctgcgatgcccgcggattggacggctgagtctggctacgcgggcctccgcgggagcgcgaccgggccaatcaagagcttggcgtattttacaaactgagaaagtagctccagcagcacccgagagggtcaggagaaaagcggaggaagctgggtaggccctgaggggcctcggtaagccatcatgaccacccggcaagccacgaaggatcccctcctccggggtgtatctcctacccctagcaagattccggtacgctctcagaaacgcacgcctttccccactgttacatcgtgcgccgtggaccaggagaaccaagatccaaggagatgggtgcagaaaccaccgctcaatattcaacgccccctcgttgattcagcaggccccaggccgaaagccaggcaccaggcagagacatcacaaagattggtggggatcagtcagcctcggaaccccttggaagagctcaggcctagccctaggggtcaaaatgtggggcctgggccccctgcccagacagaggctccagggaccatagagtttgtggctgaccctgcagccctggccaccatcctgtcaggtgagggtgtgaagagctgtcacctggggcgccagcctagtctggctaaaagagtactggttcgaggaagtcagggaggcaccacccagagggtccagggtgttcgggcctctgcatatttggcccccagaacccccacccaccgactggaccctgccagggcttcctgcttctctaggctggagggaccaggacctcgaggccggacattgtgcccccagaggctacaggctctgatttcaccttcaggaccttcctttcacccttccactcgccccagtttccaggagctaagaagggagacagctggcagcagccggacttcagtgagccaggcctcaggattgctcctggagaccccagtccagcctgctttctctcttcctaaaggagaacgcgaggttgtcactcactcagatgaaggaggtgtggcctctcttggtctggcccagcgagtaccattaagagaaaaccgagaaatgtcacataccagggacagccatgactcccacctgatgccctcccctgcccctgtggcccagcccttgcctggccatgtggtgccatgtccatcaccctttggacgggctcagcgtgtaccctccccaggccctccaactctgacctcatattcagtgttgcggcgtctcaccgttcaacctaaaacccggttcacacccatgccatcaacccccagagttcagcaggcccagtggctgcgtggtgtctcccctcagtcctgctctgaagatcctgccctgccctgggagcaggttgccgtccggttgtttgaccaggagagttgtataaggtcactggagggttctgggaaaccaccggtggccactccttctggaccccactctaacagaacccccagcctccaggaggtgaagattcaagtgagtctgtgtggccaacagctttgatgtctattgaacagtgactgggctgaggaagagggaaaagagatgggggatcaggaataggacagtgtgggtagactactgaacgcacatcttgatgtcacactggggtgctctctcccaccacagcgcatcggtatcctgcaacagctgttgagacaggaagtagaggggctggtagggggccagtgtgtccctcttaatggaggctcttctctggatatggttgaacttcagcccctgctgactgagatttctagaactctgaatgccacagagcataactctgggacttcccaccttcctggactgttaaaacactcagggctgccaaagccctgtcttccagaggagtgcggggaaccacagccctgccctccggcagagcctgggcccccagaggccttctgtaggagtgagcctgagataccagagccctccctccaggaacagcttgaagtaccagagccctaccctccagcagaacccaggcccctagagtcctgctgtaggagtgagcctgagataccggagtcctctcgccaggaacagcttgaggaacagcttgaggtacctgagccctgccctccagcagaacccgggccccttcagcccagcacccaggggcagtctggacccccagggccctgccctagggtagagctgggggcatcagagccctgcaccctggaacatagaagtctagagtccagtctaccaccctgctgcagtcagtgggctccagcaaccaccagcctgatcttctcttcccaacacccgctttgtgccagcccccctatctgctcactccagtctttgagacccccagcaggccaggcaggcctcagcaatctggcccctcgaaccctagccctgagggagcgcctcaaatcgtgtttaaccgccatccactgcttccacgaggctcgtctggacgatgagtgtgccttttacaccagccgagcccctccctcaggccccacccgggtctgcaccaaccctgtggctacattactcgaatggcaggatgccctgtgtttcattccagttggttctgctgccccccagggctctccatgatgagacaaccactcctgccctgccgtacttcttccttttagcccttatttattgtcggtctgcccatgggactgggagccgcccacttttgtcctcaataaagtttctaaagtatc

SEQ ID NO: 441 - DNA, 2933 bp, Homo sapiens
aggggttaccccttccatcttaagcaggatattctaggatctctcagtctcacagccttgcccaccaataaccagcagaaagcggttcgacaattggtccttcttttggcccctcctgcgatgcccgcggattggacggctgagtctggctacgcgggcctccgcgggagcgcgaccgggccaatcaagagcttggcgtattttacaaactgagaaagtagctccagcagcacccgagagggtcaggagaaaagcggaggaagctgggtaggccctgaggggcctcggtaagccatcatgaccacccggcaagccacgaaggatcccctcctccggggtgtatctcctacccctagcaagattccggtacgctctcagaaacgcacgcctttccccactgttacatcgtgcgccgtggaccaggagaaccaagatccaaggagatgggtgcagaaaccaccgctcaatattcaacgccccctcgttgattcagcaggccccaggccgaaagccaggcaccaggcagagacatcacaaagattggtggggatcagtcagcctcggaaccccttggaagagctcaggcctagccctaggggtcaaaatgtggggcctgggccccctgcccagacagaggctccagggaccatagagtttgtggctgaccctgcagccctggccaccatcctgtcaggtgagggtgtgaagagctgtcacctggggcgccagcctagtctggctaaaagagtactggttcgaggaagtcagggaggcaccacccagagggtccagggtgttcgggcctctgcatatttggcccccagaacccccacccaccgactggaccctgccagggcttcctgcttctctaggctggagggaccaggacctcgaggccggacattgtgcccccagaggctacaggctctgatttcaccttcaggaccttcctttcacccttccactcgccccagtttccaggagctaagaagggagacagctggcagcagccggacttcagtgagccaggcctcaggattgctcctggagaccccagtccagcctgctttctctcttcctaaaggagaacgcgaggttgtcactcactcagatgaaggaggtgtggcctctcttggtctggcccagcgagtaccattaagagaaaaccgagaaatgtcacataccagggacagccatgactcccacctgatgccctcccctgcccctgtggcccagcccttgcctggccatgtggtgccatgtccatcaccctttggacgggctcagcgtgtaccctccccaggccctccaactctgacctcatattcagtgttgcggcgtctcaccgttcaacctaaaacccggttcacacccatgccatcaacccccagagttcagcaggcccagtggctgcgtggtgtctcccctcagtcctgctctgaagatcctgccctgccctgggagcaggttgccgtccggttgtttgaccaggagagttgtataaggtcactggagggttctgggaaaccaccggtggccactccttctggaccccactctaacagaacccccagcctccaggaggtgaagattcaacgcatcggtatcctgcaacagctgttgagacaggaagtagaggggctggtagggggccagtgtgtccctcttaatggaggctcttctctggatatggttgaacttcagcccctgctgactgagatttctagaactctgaatgccacagagcataactctgggacttcccaccttcctggactgttaaaacactcagggctgccaaagccctgtcttccagaggagtgcggggaaccacagccctgccctccggcagagcctgggcccccagaggccttctgtaggagtgagcctgagataccagagccctccctccaggaacagcttgaagtaccagagccctaccctccagcagaacccaggcccctagagtcctgctgtaggagtgagcctgagataccggagtcctctcgccaggaacagcttgaggaacagcttgaggtacctgagccctgccctccagcagaacccgggccccttcagcccagcacccaggggcagtctggacccccagggccctgccctagggtagagctgggggcatcagagccctgcaccctggaacatagaagtctagagtccagtctaccaccctgctgcagtcagtgggctccagcaaccaccagcctgatcttctcttcccaacacccgctttgtgccagcccccctatctgctcactccagtctttgagacccccagcaggccaggcaggtaaggagttggctgggaaggagtgtgaacacaagaggtcctcacctcactgtgagctgcacacctgccctgcccctaccccaggcaatctcatgcttccacaccttccaccctggcccagcctggctctccctcaggaagaggggaggggctgcacttccagccctgtgctcctaattggcttggccgttggtgggggaggaggagaggacagtacatggtggaagtataggaccccagacctccctctaaattttccatgcccctcaggcctcagcaatctggcccctcgaaccctagccctgagggagcgcctcaaatcgtgtttaaccgccatccactgcttccacgaggctcgtctggacgatgagtgtgccttttacaccagccgagcccctccctcaggccccacccgggtctgcaccaaccctgtggctacattactcgaatggcaggatgccctgtgtttcattccagttggttctgctgccccccagggctctccatgatgagacaaccactcctgccctgccgtacttcttccttttagcccttatttattgtcggtctgcccatgggactgggagccgcccacttttgtcctcaataaagtttctaaagtatc

SEQ ID NO: 442 - DNA, 3020 bp, Homo sapiens
aggggttaccccttccatcttaagcaggatattctaggatctctcagtctcacagccttgcccaccaataaccagcagaaagcggttcgacaattggtccttcttttggcccctcctgcgatgcccgcggattggacggctgagtctggctacgcgggcctccgcgggagcgcgaccgggccaatcaagagcttggcgtattttacaaactgagaaagtagctccagcagcacccgagagggtcaggagaaaagcggaggaagctgggtaggccctgaggggcctcggtaagccatcatgaccacccggcaagccacgaaggatcccctcctccggggtgtatctcctacccctagcaagattccggtacgctctcagaaacgcacgcctttccccactgttacatcgtgcgccgtggaccaggagaaccaagatccaaggagatgggtgcagaaaccaccgctcaatattcaacgccccctcgttgattcagcaggccccaggccgaaagccaggcaccaggcagagacatcacaaagattggtggggatcagtcagcctcggaaccccttggaagagctcaggcctagccctaggggtcaaaatgtggggcctgggccccctgcccagacagaggctccagggaccatagagtttgtggctgaccctgcagccctggccaccatcctgtcaggtgagggtgtgaagagctgtcacctggggcgccagcctagtctggctaaaagagtactggttcgaggaagtcagggaggcaccacccagagggtccagggtgttcgggcctctgcatatttggcccccagaacccccacccaccgactggaccctgccagggcttcctgcttctctaggctggagggaccaggacctcgaggccggacattgtgcccccagaggctacaggctctgatttcaccttcaggaccttcctttcacccttccactcgccccagtttccaggagctaagaagggagacagctggcagcagccggacttcagtgagccaggcctcaggattgctcctggagaccccagtccagcctgctttctctcttcctaaaggagaacgcgaggttgtcactcactcagatgaaggaggtgtggcctctcttggtctggcccagcgagtaccattaagagaaaaccgagaaatgtcacataccagggacagccatgactcccacctgatgccctcccctgcccctgtggcccagcccttgcctggccatgtggtgccatgtccatcaccctttggacgggctcagcgtgtaccctccccaggccctccaactctgacctcatattcagtgttgcggcgtctcaccgttcaacctaaaacccggttcacacccatgccatcaacccccagagttcagcaggcccagtggctgcgtggtgtctcccctcagtcctgctctgaagatcctgccctgccctgggagcaggttgccgtccggttgtttgaccaggagagttgtataaggtcactggagggttctgggaaaccaccggtggccactccttctggaccccactctaacagaacccccagcctccaggaggtgaagattcaacgcatcggtatcctgcaacagctgttgagacaggaagtagaggggctggtagggggccagtgtgtccctcttaatggaggctcttctctggatatggttgaacttcagcccctgctgactgagatttctagaactctgaatgccacagagcataactctgggacttcccaccttcctggactgttaaaacactcagggctgccaaagccctgtcttccagaggagtgcggggaaccacagccctgccctccggcagagcctgggcccccagaggccttctgtaggagtgagcctgagataccagagccctccctccaggaacagcttgaagtaccagagccctaccctccagcagaacccaggcccctagagtcctgctgtaggagtgagcctgagataccggagtcctctcgccaggaacagcttgaggtacctgagccctgccctccagcagaacccaggcccctagagtcctactgtaggattgagcctgagataccggagtcctctcgccaggaacagcttgaggtacctgagccctgccctccagcagaacccgggccccttcagcccagcacccaggggcagtctggacccccagggccctgccctagggtagagctgggggcatcagagccctgcaccctggaacatagaagtctagagtccagtctaccaccctgctgcagtcagtgggctccagcaaccaccagcctgatcttctcttcccaacacccgctttgtgccagcccccctatctgctcactccagtctttgagacccccagcaggccaggcaggtaaggagttggctgggaaggagtgtgaacacaagaggtcctcacctcactgtgagctgcacacctgccctgcccctaccccaggcaatctcatgcttccacaccttccaccctggcccagcctggctctccctcaggaagaggggaggggctgcacttccagccctgtgctcctaattggcttggccgttggtgggggaggaggagaggacagtacatggtggaagtataggaccccagacctccctctaaattttccatgcccctcaggcctcagcaatctggcccctcgaaccctagccctgagggagcgcctcaaatcgtgtttaaccgccatccactgcttccacgaggctcgtctggacgatgagtgtgccttttacaccagccgagcccctccctcaggccccacccgggtctgcaccaaccctgtggctacattactcgaatggcaggatgccctgtgtttcattccagttggttctgctgccccccagggctctccatgatgagacaaccactcctgccctgccgtacttcttccttttagcccttatttattgtcggtctgcccatgggactgggagccgcccacttttgtcctcaataaagtttctaaagtatc

SEQ ID NO: 443 - DNA, 2828 bp, Homo sapiens
aggggttaccccttccatcttaagcaggatattctaggatctctcagtctcacagccttgcccaccaataaccagcagaaagcggttcgacaattggtccttcttttggcccctcctgcgatgcccgcggattggacggctgagtctggctacgcgggcctccgcgggagcgcgaccgggccaatcaagagcttggcgtattttacaaactgagaaagtagctccagcagcacccgagagggtcaggagaaaagcggaggaagctgggtaggccctgaggggcctcggtaagccatcatgaccacccggcaagccacgaaggatcccctcctccggggtgtatctcctacccctagcaagattccggtacgctctcagaaacgcacgcctttccccactgttacatcgtgcgccgtggaccaggagaaccaagatccaaggagatgggtgcagaaaccaccgctcaatattcaacgccccctcgttgattcagcaggccccaggccgaaagccaggcaccaggcagagacatcacaaagattggtggggatcagtcagcctcggaaccccttggaagagctcaggcctagccctaggggtcaaaatgtggggcctgggccccctgcccagacagaggctccagggaccatagagtttgtggctgaccctgcagccctggccaccatcctgtcaggtgagggtgtgaagagctgtcacctggggcgccagcctagtctggctaaaagagtactggttcgaggaagtcagggaggcaccacccagagggtccagggtgttcgggcctctgcatatttggcccccagaacccccacccaccgactggaccctgccagggcttcctgcttctctaggctggagggaccaggacctcgaggccggacattgtgcccccagaggctacaggctctgatttcaccttcaggaccttcctttcacccttccactcgccccagtttccaggagctaagaagggagacagctggcagcagccggacttcagtgagccaggcctcaggattgctcctggagaccccagtccagcctgctttctctcttcctaaaggagaacgcgaggttgtcactcactcagatgaaggaggtgtggcctctcttggtctggcccagcgagtaccattaagagaaaaccgagaaatgtcacataccagggacagccatgactcccacctgatgccctcccctgcccctgtggcccagcccttgcctggccatgtggtgccatgtccatcaccctttggacgggctcagcgtgtaccctccccaggccctccaactctgacctcatattcagtgttgcggcgtctcaccgttcaacctaaaacccggttcacacccatgccatcaacccccagagttcagcaggcccagtggctgcgtggtgtctcccctcagtcctgctctgaagatcctgccctgccctgggagcaggttgccgtccggttgtttgaccaggagagttgtataaggtcactggagggttctgggaaaccaccggtggccactccttctggaccccactctaacagaacccccagcctccaggaggtgaagattcaacgcatcggtatcctgcaacagctgttgagacaggaagtagaggggctggtagggggccagtgtgtccctcttaatggaggctcttctctggatatggttgaacttcagcccctgctgactgagatttctagaactctgaatgccacagagcataactctgggacttcccaccttcctggactgttaaaacactcagggctgccaaagccctgtcttccagaggagtgcggggaaccacagccctgccctccggcagagcctgggcccccagaggccttctgtaggagtgagcctgagataccagagccctccctccaggaacagcttgaagtaccagagccctaccctccagcagaacccaggcccctagagtcctgctgtaggagtgagcctgagataccggagtcctctcgccaggaacagcttgaggaacagcttgaggtacctgagccctgccctccagcagaacccgggccccttcagcccagcacccaggggcagtctggacccccagggccctgccctagggtagagctgggggcatcagagccctgcaccctggaacatagaagtctagagtccagtctaccaccctgctgcagtcagtgggctccagcaaccaccagcctgatcttctcttcccaacacccgctttgtgccagcccccctatctgctcactccagtctttgagacccccagcaggccaggcaggcctcagcaatctggcccctcgaaccctagccctgagggagcgcctcaaatcgtgtttaaccgccatccactgcttccacgaggctcgtctggacgatgagtgtgccttttacaccagccgagcccctccctcaggccccacccgggtctgcaccaaccctgtggctacattactcgaatggcaggatgccctggtgagactccaacccacagcccagctgtggctgcacagtgagcctgatgggaggtggggaacagggacagggggccacctgggcttcttcacagagaggtcagcaggaaggcttggctacagtgcaaggttggctgagctgtgacaaggtcttctctgtctccagtgtttcattccagttggttctgctgccccccagggctctccatgatgagacaaccactcctgccctgccgtacttcttccttttagcccttatttattgtcggtctgcccatgggactgggagccgcccacttttgtcctcaataaagtttctaaagtatc

SEQ ID NO: 444 - DNA, 3218 bp, Homo sapiens
aggggttaccccttccatcttaagcaggatattctaggatctctcagtctcacagccttgcccaccaataaccagcagaaagcggttcgacaattggtccttcttttggcccctcctgcgatgcccgcggattggacggctgagtctggctacgcgggcctccgcgggagcgcgaccgggccaatcaagagcttggcgtattttacaaactgagaaagtagctccagcagcacccgagagggtcaggagaaaagcggaggaagctgggtaggccctgaggggcctcggtaagccatcatgaccacccggcaagccacgaaggatcccctcctccggggtgtatctcctacccctagcaagattccggtacgctctcagaaacgcacgcctttccccactgttacatcgtgcgccgtggaccaggagaaccaagatccaaggagatgggtgcagaaaccaccgctcaatattcaacgccccctcgttgattcagcaggccccaggccgaaagccaggcaccaggcagagacatcacaaagattggtggggatcagtcagcctcggaaccccttggaagagctcaggcctagccctaggggtcaaaatgtggggcctgggccccctgcccagacagaggctccagggaccatagagtttgtggctgaccctgcagccctggccaccatcctgtcaggtgagggtgtgaagagctgtcacctggggcgccagcctagtctggctaaaagagtactggttcgaggaagtcagggaggcaccacccagagggtccagggtgttcgggcctctgcatatttggcccccagaacccccacccaccgactggaccctgccagggcttcctgcttctctaggctggagggaccaggacctcgaggccggacattgtgcccccagaggctacaggctctgatttcaccttcaggaccttcctttcacccttccactcgccccagtttccaggagctaagaagggagacagctggcagcagccggacttcagtgagccaggcctcaggattgctcctggagaccccagtccagcctgctttctctcttcctaaaggagaacgcgaggttgtcactcactcagatgaaggaggtgtggcctctcttggtctggcccagcgagtaccattaagagaaaaccgagaaatgtcacataccagggacagccatgactcccacctgatgccctcccctgcccctgtggcccagcccttgcctggccatgtggtgccatgtccatcaccctttggacgggctcagcgtgtaccctccccaggccctccaactctgacctcatattcagtgttgcggcgtctcaccgttcaacctaaaacccggttcacacccatgccatcaacccccagagttcagcaggcccagtggctgcgtggtgtctcccctcagtcctgctctgaagatcctgccctgccctgggtaagtatcagaagcttccccctactgagatcccttgccctgtgctgccagcctggaggcccaggagtttgaggcacacgtgctttctgggccaggcatggtggctcacacctgtaatcccagcactttgggaggctgaggtaggaggattgcttgagctcagatctttgagaccagcctgggcaacatagtgagaccctgtctccactaaaattttaaaaattagaaagtgctctctggaaaagctgcctaactctcactgcttctctgctgcccctcctaatgtacatctagggcctctcagttaggggcttcaatccattcctcatgagggtgggactcaggctggtctttctcctgccccagcctggcttgcttgtgtgccttgttccttggtgacaggagcaggttgccgtccggttgtttgaccaggagagttgtataaggtcactggagggttctgggaaaccaccggtggccactccttctggaccccactctaacagaacccccagcctccaggaggtgaagattcaagtgagtctgtgtggccaacagctttgatgtctattgaacagtgactgggctgaggaagagggaaaagagatgggggatcaggaataggacagtgtgggtagactactgaacgcacatcttgatgtcacactggggtgctctctcccaccacagcgcatcggtatcctgcaacagctgttgagacaggaagtagaggggctggtagggggccagtgtgtccctcttaatggaggctcttctctggatatggttgaacttcagcccctgctgactgagatttctagaactctgaatgccacagagcataactctgggacttcccaccttcctggactgttaaaacactcagggctgccaaagccctgtcttccagaggagtgcggggaaccacagccctgccctccggcagagcctgggcccccagaggccttctgtaggagtgagcctgagataccagagccctccctccaggaacagcttgaagtaccagagccctaccctccagcagaacccaggcccctagagtcctgctgtaggagtgagcctgagataccggagtcctctcgccaggaacagcttgaggaacagcttgaggtacctgagccctgccctccagcagaacccgggccccttcagcccagcacccaggggcagtctggacccccagggccctgccctagggtagagctgggggcatcagagccctgcaccctggaacatagaagtctagagtccagtctaccaccctgctgcagtcagtgggctccagcaaccaccagcctgatcttctcttcccaacacccgctttgtgccagcccccctatctgctcactccagtctttgagacccccagcaggccaggcaggcctcagcaatctggcccctcgaaccctagccctgagggagcgcctcaaatcgtgtttaaccgccatccactgcttccacgaggctcgtctggacgatgagtgtgccttttacaccagccgagcccctccctcaggccccacccgggtctgcaccaaccctgtggctacattactcgaatggcaggatgccctgtgtttcattccagttggttctgctgccccccagggctctccatgatgagacaaccactcctgccctgccgtacttcttccttttagcccttatttattgtcggtctgcccatgggactgggagccgcccacttttgtcctcaataaagtttctaaagtatc

SEQ ID NO: 445 - DNA, 3422 bp, Homo sapiens
aggggttaccccttccatcttaagcaggatattctaggatctctcagtctcacagccttgcccaccaataaccagcagaaagcggttcgacaattggtccttcttttggcccctcctgcgatgcccgcggattggacggctgagtctggctacgcgggcctccgcgggagcgcgaccgggccaatcaagagcttggcgtattttacaaactgagaaagtagctccagcagcacccgagagggtcaggagaaaagcggaggaagctgggtaggccctgaggggcctcggtaagccatcatgaccacccggcaagccacgaaggatcccctcctccggggtgtatctcctacccctagcaagattccggtacgctctcagaaacgcacgcctttccccactgttacatcgtgcgccgtggaccaggagaaccaagatccaaggagatgggtgcagaaaccaccgctcaatattcaacgccccctcgttgattcagcaggccccaggccgaaagccaggcaccaggcagagacatcacaaagattggtggggatcagtcagcctcggaaccccttggaagagctcaggcctagccctaggggtcaaaatgtggggcctgggccccctgcccagacagaggctccagggaccatagagtttgtggctgaccctgcagccctggccaccatcctgtcaggtgagggtgtgaagagctgtcacctggggcgccagcctagtctggctaaaagagtactggttcgaggaagtcagggaggcaccacccagagggtccagggtgttcgggcctctgcatatttggcccccagaacccccacccaccgactggaccctgccagggcttcctgcttctctaggctggagggaccaggacctcgaggccggacattgtgcccccagaggctacaggctctgatttcaccttcaggaccttcctttcacccttccactcgccccagtttccaggagctaagaagggagacagctggcagcagccggacttcagtgagccaggcctcaggattgctcctggagaccccagtccagcctgctttctctcttcctaaaggagaacgcgaggttgtcactcactcagatgaaggaggtgtggcctctcttggtctggcccagcgagtaccattaagagaaaaccgagaaatgtcacataccagggacagccatgactcccacctgatgccctcccctgcccctgtggcccagcccttgcctggccatgtggtgccatgtccatcaccctttggacgggctcagcgtgtaccctccccaggccctccaactctgacctcatattcagtgttgcggcgtctcaccgttcaacctaaaacccggttcacacccatgccatcaacccccagagttcagcaggcccagtggctgcgtggtgtctcccctcagtcctgctctgaagatcctgccctgccctgggtaagtatcagaagcttccccctactgagatcccttgccctgtgctgccagcctggaggcccaggagtttgaggcacacgtgctttctgggccaggcatggtggctcacacctgtaatcccagcactttgggaggctgaggtaggaggattgcttgagctcagatctttgagaccagcctgggcaacatagtgagaccctgtctccactaaaattttaaaaattagaaagtgctctctggaaaagctgcctaactctcactgcttctctgctgcccctcctaatgtacatctagggcctctcagttaggggcttcaatccattcctcatgagggtgggactcaggctggtctttctcctgccccagcctggcttgcttgtgtgccttgttccttggtgacaggagcaggttgccgtccggttgtttgaccaggagagttgtataaggtcactggagggttctgggaaaccaccggtggccactccttctggaccccactctaacagaacccccagcctccaggaggtgaagattcaacgcatcggtatcctgcaacagctgttgagacaggaagtagaggggctggtagggggccagtgtgtccctcttaatggaggctcttctctggatatggttgaacttcagcccctgctgactgagatttctagaactctgaatgccacagagcataactctgggacttcccaccttcctggactgttaaaacactcagggctgccaaagccctgtcttccagaggagtgcggggaaccacagccctgccctccggcagagcctgggcccccagaggccttctgtaggagtgagcctgagataccagagccctccctccaggaacagcttgaagtaccagagccctaccctccagcagaacccaggcccctagagtcctgctgtaggagtgagcctgagataccggagtcctctcgccaggaacagcttgaggtacctgagccctgccctccagcagaacccaggcccctagagtcctactgtaggattgagcctgagataccggagtcctctcgccaggaacagcttgaggtacctgagccctgccctccagcagaacccgggccccttcagcccagcacccaggggcagtctggacccccagggccctgccctagggtagagctgggggcatcagagccctgcaccctggaacatagaagtctagagtccagtctaccaccctgctgcagtcagtgggctccagcaaccaccagcctgatcttctcttcccaacacccgctttgtgccagcccccctatctgctcactccagtctttgagacccccagcaggccaggcaggtaaggagttggctgggaaggagtgtgaacacaagaggtcctcacctcactgtgagctgcacacctgccctgcccctaccccaggcaatctcatgcttccacaccttccaccctggcccagcctggctctccctcaggaagaggggaggggctgcacttccagccctgtgctcctaattggcttggccgttggtgggggaggaggagaggacagtacatggtggaagtataggaccccagacctccctctaaattttccatgcccctcaggcctcagcaatctggcccctcgaaccctagccctgagggagcgcctcaaatcgtgtttaaccgccatccactgcttccacgaggctcgtctggacgatgagtgtgccttttacaccagccgagcccctccctcaggccccacccgggtctgcaccaaccctgtggctacattactcgaatggcaggatgccctgtgtttcattccagttggttctgctgccccccagggctctccatgatgagacaaccactcctgccctgccgtacttcttccttttagcccttatttattgtcggtctgcccatgggactgggagccgcccacttttgtcctcaataaagtttctaaagtatc

SEQ ID NO: 446 - DNA, 3098 bp, Homo sapiens
aggggttaccccttccatcttaagcaggatattctaggatctctcagtctcacagccttgcccaccaataaccagcagaaagcggttcgacaattggtccttcttttggcccctcctgcgatgcccgcggattggacggctgagtctggctacgcgggcctccgcgggagcgcgaccgggccaatcaagagcttggcgtattttacaaactgagaaagtagctccagcagcacccgagagggtcaggagaaaagcggaggaagctgggtaggccctgaggggcctcggtaagccatcatgaccacccggcaagccacgaaggatcccctcctccggggtgtatctcctacccctagcaagattccggtacgctctcagaaacgcacgcctttccccactgttacatcgtgcgccgtggaccaggagaaccaagatccaaggagatgggtgcagaaaccaccgctcaatattcaacgccccctcgttgattcagcaggccccaggccgaaagccaggcaccaggcagagacatcacaaagattggtggggatcagtcagcctcggaaccccttggaagagctcaggcctagccctaggggtcaaaatgtggggcctgggccccctgcccagacagaggctccagggaccatagagtttgtggctgaccctgcagccctggccaccatcctgtcaggtgagggtgtgaagagctgtcacctggggcgccagcctagtctggctaaaagagtactggttcgaggaagtcagggaggcaccacccagagggtccagggtgttcgggcctctgcatatttggcccccagaacccccacccaccgactggaccctgccagggcttcctgcttctctaggctggagggaccaggacctcgaggccggacattgtgcccccagaggctacaggctctgatttcaccttcaggaccttcctttcacccttccactcgccccagtttccaggagctaagaagggagacagctggcagcagccggacttcagtgagccaggcctcaggattgctcctggagaccccagtccagcctgctttctctcttcctaaaggagaacgcgaggttgtcactcactcagatgaaggaggtgtggcctctcttggtctggcccagcgagtaccattaagagaaaaccgagaaatgtcacataccagggacagccatgactcccacctgatgccctcccctgcccctgtggcccagcccttgcctggccatgtggtgccatgtccatcaccctttggacgggctcagcgtgtaccctccccaggccctccaactctgacctcatattcagtgttgcggcgtctcaccgttcaacctaaaacccggttcacacccatgccatcaacccccagagttcagcaggcccagtggctgcgtggtgtctcccctcagtcctgctctgaagatcctgccctgccctgggagcaggttgccgtccggttgtttgaccaggagagttgtataaggtcactggagggttctgggaaaccaccggtggccactccttctggaccccactctaacagaacccccagcctccaggaggtgaagattcaacgcatcggtatcctgcaacagctgttgagacaggaagtagaggggctggtagggggccagtgtgtccctcttaatggaggctcttctctggatatggttgaacttcagcccctgctgactgagatttctagaactctgaatgccacagagcataactctgggacttcccaccttcctggactgttaaaacactcagggctgccaaagccctgtcttccagaggagtgcggggaaccacagccctgccctccggcagagcctgggcccccagaggccttctgtaggagtgagcctgagataccagagccctccctccaggaacagcttgaagtaccagagccctaccctccagcagaacccaggcccctagagtcctgctgtaggagtgagcctgagataccggagtcctctcgccaggaacagcttgaggaacagcttgaggtacctgagccctgccctccagcagaacccgggccccttcagcccagcacccaggggcagtctggacccccagggccctgccctagggtagagctgggggcatcagagccctgcaccctggaacatagaagtctagagtccagtctaccaccctgctgcagtcagtgggctccagcaaccaccagcctgatcttctcttcccaacacccgctttgtgccagcccccctatctgctcactccagtctttgagacccccagcaggccaggcaggtaaggagttggctgggaaggagtgtgaacacaagaggtcctcacctcactgtgagctgcacacctgccctgcccctaccccaggcaatctcatgcttccacaccttccaccctggcccagcctggctctccctcaggaagaggggaggggctgcacttccagccctgtgctcctaattggcttggccgttggtgggggaggaggagaggacagtacatggtggaagtataggaccccagacctccctctaaattttccatgcccctcaggcctcagcaatctggcccctcgaaccctagccctgagggagcgcctcaaatcgtgtttaaccgccatccactgcttccacgaggctcgtctggacgatgagtgtgccttttacaccagccgagcccctccctcaggccccacccgggtctgcaccaaccctgtggctacattactcgaatggcaggatgccctggtgagactccaacccacagcccagctgtggctgcacagtgagcctgatgggaggtggggaacagggacagggggccacctgggcttcttcacagagaggtcagcaggaaggcttggctacagtgcaaggttggctgagctgtgacaaggtcttctctgtctccagtgtttcattccagttggttctgctgccccccagggctctccatgatgagacaaccactcctgccctgccgtacttcttccttttagcccttatttattgtcggtctgcccatgggactgggagccgcccacttttgtcctcaataaagtttctaaagtatc

SEQ ID NO: 447 - DNA, 2163 bp, Homo sapiens
aaaaaaaaaaaaaaaaataagccaaattcaattgaatgagtctcttgctcaccttgtacctcaaagttcctatgctaggggccctatccccctcagccttcccccttccttttccttctcctctttccttgcagaggctccagggaccatagagtttgtggctgaccctgcagccctggccaccatcctgtcaggtgagggtgtgaagagctgtcacctggggcgccagcctagtctggctaaaagagtactggttcgaggaagtcagggaggcaccacccagagggtccagggtgttcgggcctctgcatatttggcccccagaacccccacccaccgactggaccctgccagggcttcctgcttctctaggctggagggaccaggacctcgaggccggacattgtgcccccagaggctacaggctctgatttcaccttcaggaccttcctttcacccttccactcgccccagtttccaggagctaagaagggagacagctggcagcagccggacttcagtgagccaggcctcaggattgctcctggagaccccagtccagcctgctttctctcttcctaaaggagaacgcgaggttgtcactcactcagatgaaggaggtgtggcctctcttggtctggcccagcgagtaccattaagagaaaaccgagaaatgtcacataccagggacagccatgactcccacctgatgccctcccctgcccctgtggcccagcccttgcctggccatgtggtgccatgtccatcaccctttggacgggctcagcgtgtaccctccccaggccctccaactctgacctcatattcagtgttgcggcgtctcaccgttcaacctaaaacccggttcacacccatgccatcaacccccagagttcagcaggcccagtggctgcgtggtgtctcccctcagtcctgctctgaagatcctgccctgccctgggagcaggttgccgtccggttgtttgaccaggagagttgtataaggtcactggagggttctgggaaaccaccggtggccactccttctggaccccactctaacagaacccccagcctccaggaggtgaagattcaacgcatcggtatcctgcaacagctgttgagacaggaagtagaggggctggtagggggccagtgtgtccctcttaatggaggctcttctctggatatggttgaacttcagcccctgctgactgagatttctagaactctgaatgccacagagcataactctgggacttcccaccttcctggactgttaaaacactcagggctgccaaagccctgtcttccagaggagtgcggggaaccacagccctgccctccggcagagcctgggcccccagaggccttctgtaggagtgagcctgagataccagagccctccctccaggaacagcttgaagtaccagagccctaccctccagcagaacccaggcccctagagtcctgctgtaggagtgagcctgagataccggagtcctctcgccaggaacagcttgaggaacagcttgaggtacctgagccctgccctccagcagaacccgggccccttcagcccagcacccaggggcagtctggacccccagggccctgccctagggtagagctgggggcatcagagccctgcaccctggaacatagaagtctagagtccagtctaccaccctgctgcagtcagtgggctccagcaaccaccagcctgatcttctcttcccaacacccgctttgtgccagcccccctatctgctcactccagtctttgagacccccagcaggccaggcaggcctcagcaatctggcccctcgaaccctagccctgagggagcgcctcaaatcgtgtttaaccgccatccactgcttccacgaggctcgtctggacgatgagtgtgccttttacaccagccgagcccctccctcaggccccacccgggtctgcaccaaccctgtggctacattactcgaatggcaggatgccctgtgtttcattccagttggttctgctgccccccagggctctccatgatgagacaaccactcctgccctgccgtacttcttccttttagcccttatttattgtcggtctgcccatgggactgggagccgcccacttttgtcctcaataaagtttctaaagtatc

SEQ ID NO: 448 - DNA, 2171 bp, Homo sapiens
ggcgggcagatcacgaggtcaggagatcgagaccatcctggctaacatggtgaaaccccatctctactaaatatacaaaaaattagccgggcatggtggcgggcacctgtagtcccagctactcgggaggctgaggcaggagaatggtgtgaacccgggatgcggagcttgcagtgagccaagatcgcgccactggactccatcctgggtgacagagcgagactccgtatcaaaaaaaaaaataggaagacaaagggggcggggatcactcttccacctttttcttcttcacaggacagccatgactcccacctgatgccctcccctgcccctgtggcccagcccttgcctggccatgtggtgccatgtccatcaccctttggacgggctcagcgtgtaccctccccaggccctccaactctgacctcatattcagtgttgcggcgtctcaccgttcaacctaaaacccggttcacacccatgccatcaacccccagagttcagcaggcccagtggctgcgtggtgtctcccctcagtcctgctctgaagatcctgccctgccctgggtaagtatcagaagcttccccctactgagatcccttgccctgtgctgccagcctggaggcccaggagtttgaggcacacgtgctttctgggccaggcatggtggctcacacctgtaatcccagcactttgggaggctgaggtaggaggattgcttgagctcagatctttgagaccagcctgggcaacatagtgagaccctgtctccactaaaattttaaaaattagaaagtgctctctggaaaagctgcctaactctcactgcttctctgctgcccctcctaatgtacatctagggcctctcagttaggggcttcaatccattcctcatgagggtgggactcaggctggtctttctcctgccccagcctggcttgcttgtgtgccttgttccttggtgacaggagcaggttgccgtccggttgtttgaccaggagagttgtataaggtcactggagggttctgggaaaccaccggtggccactccttctggaccccactctaacagaacccccagcctccaggaggtgaagattcaacgcatcggtatcctgcaacagctgttgagacaggaagtagaggggctggtagggggccagtgtgtccctcttaatggaggctcttctctggatatggttgaacttcagcccctgctgactgagatttctagaactctgaatgccacagagcataactctgggacttcccaccttcctggactgttaaaacactcagggctgccaaagccctgtcttccagaggagtgcggggaaccacagccctgccctccggcagagcctgggcccccagaggccttctgtaggagtgagcctgagataccagagccctccctccaggaacagcttgaagtaccagagccctaccctccagcagaacccaggcccctagagtcctgctgtaggagtgagcctgagataccggagtcctctcgccaggaacagcttgaggaacagcttgaggtacctgagccctgccctccagcagaacccgggccccttcagcccagcacccaggggcagtctggacccccagggccctgccctagggtagagctgggggcatcagagccctgcaccctggaacatagaagtctagagtccagtctaccaccctgctgcagtcagtgggctccagcaaccaccagcctgatcttctcttcccaacacccgctttgtgccagcccccctatctgctcactccagtctttgagacccccagcaggccaggcaggcctcagcaatctggcccctcgaaccctagccctgagggagcgcctcaaatcgtgtttaaccgccatccactgcttccacgaggctcgtctggacgatgagtgtgccttttacaccagccgagcccctccctcaggccccacccgggtctgcaccaaccctgtggctacattactcgaatggcaggatgccctgtgtttcattccagttggttctgctgccccccagggctctccatgatgagacaaccactcctgccctgccgtacttcttccttttagcccttatttattgtcggtctgcccatgggactgggagccgcccacttttgtcctcaataaagtttctaaagtatc

SEQ ID NO: 449 - DNA, 973 bp, Homo sapiens
aggggttaccccttccatcttaagcaggatattctaggatctctcagtctcacagccttgcccaccaataaccagcagaaagcggttcgacaattggtccttcttttggcccctcctgcgatgcccgcggattggacggctgagtctggctacgcgggcctccgcgggagcgcgaccgggccaatcaagagcttggcgtattttacaaactgagaaagtagctccagcagcacccgagagggtcaggagaaaagcggaggaagctgggtaggccctgaggggcctcggtaagccatcatgaccacccggcaagccacgaaggatcccctcctccggggtgtatctcctacccctagcaagattccggtacgctctcagaaacgcacgcctttccccactgttacatcgtgcgccgtggaccaggagaaccaagatccaaggagatgggtgcagaaaccaccgctcaatattcaacgccccctcgttgattcagcaggccccaggccgaaagccaggcaccaggcagagacatcacaaagattggtggggatcagtcagcctcggaaccccttggaagagctcaggcctagccctaggggtcaaaatgtggggcctgggccccctgcccagacaggtacctgttggagccatggtaacacggcctccatggctgagtaggggactaggaagggtaaaagtggggttttggggttttgcactcactcctgctgtctcctacttactgtgatagtcctggtcccagctcctggaaagctctttgctcttagaagatctccctttcctccagcaaaatgtcatctcgccaggtgccatggcttgtacctgtaatcacagctactcaggaggctgaagcaggaggatcactggaggccaggagttggagaccagcctggatgacagagggagatcccatctctttaaaaaataaataaataaataaataataaatatc

SEQ ID NO: 450 - DNA, 214 bp, Homo sapiens
aaagcggttcgacaattggtccttcttttggcccctcctgcgatgcccgcggattggacggctgagtctggctacgcgggcctccgcgggagcgcgaccgggccaatcaagagcttggcgtattttacaaactgagaaagtagctccagcagcacccgagagggtcaggagaaaagcggaggaagctgggtaggccctgaggggcctcggtaag

SEQ ID NO: 451 - DNA, 134 bp, Homo sapiens
aaaaaaaaaaaaaaaaataagccaaattcaattgaatgagtctcttgctcaccttgtacctcaaagttcctatgctaggggccctatccccctcagccttcccccttccttttccttctcctctttccttgcag

SEQ ID NO: 452 - DNA, 294 bp, Homo sapiens
ggcgggcagatcacgaggtcaggagatcgagaccatcctggctaacatggtgaaaccccatctctactaaatatacaaaaaattagccgggcatggtggcgggcacctgtagtcccagctactcgggaggctgaggcaggagaatggtgtgaacccgggatgcggagcttgcagtgagccaagatcgcgccactggactccatcctgggtgacagagcgagactccgtatcaaaaaaaaaaataggaagacaaagggggcggggatcactcttccacctttttcttcttcacag

SEQ ID NO: 453 - DNA, 402 bp, Homo sapiens
gtaagtatcagaagcttccccctactgagatcccttgccctgtgctgccagcctggaggcccaggagtttgaggcacacgtgctttctgggccaggcatggtggctcacacctgtaatcccagcactttgggaggctgaggtaggaggattgcttgagctcagatctttgagaccagcctgggcaacatagtgagaccctgtctccactaaaattttaaaaattagaaagtgctctctggaaaagctgcctaactctcactgcttctctgctgcccctcctaatgtacatctagggcctctcagttaggggcttcaatccattcctcatgagggtgggactcaggctggtctttctcctgccccagcctggcttgcttgtgtgccttgttccttggtgacag

SEQ ID NO: 454 - DNA, 153 bp, Homo sapiens
gtgagtctgtgtggccaacagctttgatgtctattgaacagtgactgggctgaggaagagggaaaagagatgggggatcaggaataggacagtgtgggtagactactgaacgcacatcttgatgtcacactggggtgctctctcccaccacag

SEQ ID NO: 455 - DNA, 270 bp, Homo sapiens
gtaaggagttggctgggaaggagtgtgaacacaagaggtcctcacctcactgtgagctgcacacctgccctgcccctaccccaggcaatctcatgcttccacaccttccaccctggcccagcctggctctccctcaggaagaggggaggggctgcacttccagccctgtgctcctaattggcttggccgttggtgggggaggaggagaggacagtacatggtggaagtataggaccccagacctccctctaaattttccatgcccctcag

SEQ ID NO: 456 - DNA, 165 bp, Homo sapiens
gtgagactccaacccacagcccagctgtggctgcacagtgagcctgatgggaggtggggaacagggacagggggccacctgggcttcttcacagagaggtcagcaggaaggcttggctacagtgcaaggttggctgagctgtgacaaggtcttctctgtctccag

SEQ ID NO: 457 - DNA, 105 bp, Homo sapiens
gtacctgttggagccatggtaacacggcctccatggctgagtaggggactaggaagggtaaaagtggggttttggggttttgcactcactcctgctgtctcctac

SEQ ID NO: 458 - DNA, 12 bp, Homo sapiens
ttactgtgatag

SEQ ID NO: 459 - DNA, 57 bp, Homo sapiens
tcctggtcccagctcctggaaagctctttgctcttagaagatctccctttcctccag

SEQ ID NO: 460 - DNA, 87 bp, Homo sapiens
gtacctgagccctgccctccagcagaacccaggcccctagagtcctactgtaggattgagcctgagataccggagtcctctcgccag

SEQ ID NO: 461 - DNA, 12 bp, Homo sapiens
gaacagcttgag

SEQ ID NO: 462 - protein, 778 aa, Homo sapiens; identical to SEQ ID NO: 426

SEQ ID NO: 463 - protein, 778 aa, Homo sapiens; identical to SEQ ID NO: 426

SEQ ID NO: 464 - protein, 778 aa, Homo sapiens; identical to SEQ ID NO: 426

SEQ ID NO: 465 - protein, 144 aa, Homo sapiens; identical to SEQ ID NO: 439

SEQ ID NO: 466 - protein, 144 aa, Homo sapiens; identical to SEQ ID NO: 439

SEQ ID NO: 467 - protein, 778 aa, Homo sapiens
MTTRQATKDPLLRGVSPTPSKIPVRSQKRTPFPTVTSCAVDQENQDPRRWVQKPPLNIQRPLVDSAGPRPKARHQAETSQRLVGISQPRNPLEELRPSPRGQNVGPGPPAQTEAPGTIEFVADPAALATILSGEGVKSCHLGRQPSLAKRVLVRGSQGGTTQRVQGVRASAYLAPRTPTHRLDPARASCFSRLEGPGPRGRTLCPQRLQALISPSGPSFHPSTRPSFQELRRETAGSSRTSVSQASGLLLETPVQPAFSLPKGEREVVTHSDEGGVASLGLAQRVPLRENREMSHTRDSHDSHLMPSPAPVAQPLPGHVVPCPSPFGRAQRVPSPGPPTLTSYSVLRRLTVQPKTRFTPMPSTPRVQQAQWLRGVSPQSCSEDPALPWEQVAVRLFDQESCIRSLEGSGKPPVATPSGPHSNRTPSLQEVKIQRIGILQQLLRQEVEGLVGGQCVPLNGGSSLDMVELQPLLTEISRTLNATEHNSGTSHLPGLLKHSGLPKPCLPEECGEPQPCPPAEPGPPEAFCRSEPEIPEPSLQEQLEVPEPYPPAEPRPLESCCRSEPEIPESSRQEQLEVPEPCPPAEPRPLESYCRIEPEIPESSRQEQLEVPEPCPPAEPGPLQPSTQGQSGPPGPCPRVELGASEPCTLEHRSLESSLPPCCSQWAPATTSLIFSSQHPLCASPPICSLQSLRPPAGQAGLSNLAPRTLALRERLKSCLTAIHCFHEARLDDECAFYTSRAPPSGPTRVCTNPVATLLEWQDALCFIPVGSAAPQGSP

SEQ ID NO: 468 - protein, 778 aa, Homo sapiens; identical to SEQ ID NO: 467

SEQ ID NO: 469 - protein, 411 aa, Homo sapiens
MTTRQATKDPLLRGVSPTPSKIPVRSQKRTPFPTVTSCAVDQENQDPRRWVQKPPLNIQRPLVDSAGPRPKARHQAETSQRLVGISQPRNPLEELRPSPRGQNVGPGPPAQTEAPGTIEFVADPAALATILSGEGVKSCHLGRQPSLAKRVLVRGSQGGTTQRVQGVRASAYLAPRTPTHRLDPARASCFSRLEGPGPRGRTLCPQRLQALISPSGPSFHPSTRPSFQELRRETAGSSRTSVSQASGLLLETPVQPAFSLPKGEREVVTHSDEGGVASLGLAQRVPLRENREMSHTRDSHDSHLMPSPAPVAQPLPGHVVPCPSPFGRAQRVPSPGPPTLTSYSVLRRLTVQPKTRFTPMPSTPRVQQAQWLRGVSPQSCSEDPALPWVSIRSFPLLRSLALCCQPGGPGV

SEQ ID NO: 470 - protein, 441 aa, Homo sapiens
MTTRQATKDPLLRGVSPTPSKIPVRSQKRTPFPTVTSCAVDQENQDPRRWVQKPPLNIQRPLVDSAGPRPKARHQAETSQRLVGISQPRNPLEELRPSPRGQNVGPGPPAQTEAPGTIEFVADPAALATILSGEGVKSCHLGRQPSLAKRVLVRGSQGGTTQRVQGVRASAYLAPRTPTHRLDPARASCFSRLEGPGPRGRTLCPQRLQALISPSGPSFHPSTRPSFQELRRETAGSSRTSVSQASGLLLETPVQPAFSLPKGEREVVTHSDEGGVASLGLAQRVPLRENREMSHTRDSHDSHLMPSPAPVAQPLPGHVVPCPSPFGRAQRVPSPGPPTLTSYSVLRRLTVQPKTRFTPMPSTPRVQQAQWLRGVSPQSCSEDPALPWEQVAVRLFDQESCIRSLEGSGKPPVATPSGPHSNRTPSLQEVKIQVSLCGQQL

SEQ ID NO: 471 - protein, 839 aa, Homo sapiens
MTTRQATKDPLLRGVSPTPSKIPVRSQKRTPFPTVTSCAVDQENQDPRRWVQKPPLNIQRPLVDSAGPRPKARHQAETSQRLVGISQPRNPLEELRPSPRGQNVGPGPPAQTEAPGTIEFVADPAALATILSGEGVKSCHLGRQPSLAKRVLVRGSQGGTTQRVQGVRASAYLAPRTPTHRLDPARASCFSRLEGPGPRGRTLCPQRLQALISPSGPSFHPSTRPSFQELRRETAGSSRTSVSQASGLLLETPVQPAFSLPKGEREVVTHSDEGGVASLGLAQRVPLRENREMSHTRDSHDSHLMPSPAPVAQPLPGHVVPCPSPFGRAQRVPSPGPPTLTSYSVLRRLTVQPKTRFTPMPSTPRVQQAQWLRGVSPQSCSEDPALPWEQVAVRLFDQESCIRSLEGSGKPPVATPSGPHSNRTPSLQEVKIQRIGILQQLLRQEVEGLVGGQCVPLNGGSSLDMVELQPLLTEISRTLNATEHNSGTSHLPGLLKHSGLPKPCLPEECGEPQPCPPAEPGPPEAFCRSEPEIPEPSLQEQLEVPEPYPPAEPRPLESCCRSEPEIPESSRQEQLEEQLEVPEPCPPAEPGPLQPSTQGQSGPPGPCPRVELGASEPCTLEHRSLESSLPPCCSQWAPATTSLIFSSQHPLCASPPICSLQSLRPPAGQAGKELAGKECEHKRSSPHCELHTCPAPTPGNLMLPHLPPWPSLALPQEEGRGCTSSPVLLIGLAVGGGGGEDSTWWKYRTPDLPLNFPCPSGLSNLAPRTLALRERLKSCLTAIHCFHEARLDDECAFYTSRAPPSGPTRVCTNPVATLLEWQDALCFIPVGSAAPQGSP

SEQ ID NO: 472 - protein, 868 aa, Homo sapiens
MTTRQATKDPLLRGVSPTPSKIPVRSQKRTPFPTVTSCAVDQENQDPRRWVQKPPLNIQRPLVDSAGPRPKARHQAETSQRLVGISQPRNPLEELRPSPRGQNVGPGPPAQTEAPGTIEFVADPAALATILSGEGVKSCHLGRQPSLAKRVLVRGSQGGTTQRVQGVRASAYLAPRTPTHRLDPARASCFSRLEGPGPRGRTLCPQRLQALISPSGPSFHPSTRPSFQELRRETAGSSRTSVSQASGLLLETPVQPAFSLPKGEREVVTHSDEGGVASLGLAQRVPLRENREMSHTRDSHDSHLMPSPAPVAQPLPGHVVPCPSPFGRAQRVPSPGPPTLTSYSVLRRLTVQPKTRFTPMPSTPRVQQAQWLRGVSPQSCSEDPALPWEQVAVRLFDQESCIRSLEGSGKPPVATPSGPHSNRTPSLQEVKIQRIGILQQLLRQEVEGLVGGQCVPLNGGSSLDMVELQPLLTEISRTLNATEHNSGTSHLPGLLKHSGLPKPCLPEECGEPQPCPPAEPGPPEAFCRSEPEIPEPSLQEQLEVPEPYPPAEPRPLESCCRSEPEIPESSRQEQLEVPEPCPPAEPRPLESYCRIEPEIPESSRQEQLEVPEPCPPAEPGPLQPSTQGQSGPPGPCPRVELGASEPCTLEHRSLESSLPPCCSQWAPATTSLIFSSQHPLCASPPICSLQSLRPPAGQAGKELAGKECEHKRSSPHCELHTCPAPTPGNLMLPHLPPWPSLALPQEEGRGCTSSPVLLIGLAVGGGGGEDSTWWKYRTPDLPLNFPCPSGLSNLAPRTLALRERLKSCLTAIHCFHEARLDDECAFYTSRAPPSGPTRVCTNPVATLLEWQDALCFIPVGSAAPQGSP

SEQ ID NO: 473 - protein, 782 aa, Homo sapiens
MTTRQATKDPLLRGVSPTPSKIPVRSQKRTPFPTVTSCAVDQENQDPRRWVQKPPLNIQRPLVDSAGPRPKARHQAETSQRLVGISQPRNPLEELRPSPRGQNVGPGPPAQTEAPGTIEFVADPAALATILSGEGVKSCHLGRQPSLAKRVLVRGSQGGTTQRVQGVRASAYLAPRTPTHRLDPARASCFSRLEGPGPRGRTLCPQRLQALISPSGPSFHPSTRPSFQELRRETAGSSRTSVSQASGLLLETPVQPAFSLPKGEREVVTHSDEGGVASLGLAQRVPLRENREMSHTRDSHDSHLMPSPAPVAQPLPGHVVPCPSPFGRAQRVPSPGPPTLTSYSVLRRLTVQPKTRFTPMPSTPRVQQAQWLRGVSPQSCSEDPALPWEQVAVRLFDQESCIRSLEGSGKPPVATPSGPHSNRTPSLQEVKIQRIGILQQLLRQEVEGLVGGQCVPLNGGSSLDMVELQPLLTEISRTLNATEHNSGTSHLPGLLKHSGLPKPCLPEECGEPQPCPPAEPGPPEAFCRSEPEIPEPSLQEQLEVPEPYPPAEPRPLESCCRSEPEIPESSRQEQLEEQLEVPEPCPPAEPGPLQPSTQGQSGPPGPCPRVELGASEPCTLEHRSLESSLPPCCSQWAPATTSLIFSSQHPLCASPPICSLQSLRPPAGQAGLSNLAPRTLALRERLKSCLTAIHCFHEARLDDECAFYTSRAPPSGPTRVCTNPVATLLEWQDALVRLQPTAQLWLHSEPDGRWGTGTGGHLGFFTERSAGRLGYSARLAEL

SEQ ID NO: 474 - protein, 872 aa, Homo sapiens
MTTRQATKDPLLRGVSPTPSKIPVRSQKRTPFPTVTSCAVDQENQDPRRWVQKPPLNIQRPLVDSAGPRPKARHQAETSQRLVGISQPRNPLEELRPSPRGQNVGPGPPAQTEAPGTIEFVADPAALATILSGEGVKSCHLGRQPSLAKRVLVRGSQGGTTQRVQGVRASAYLAPRTPTHRLDPARASCFSRLEGPGPRGRTLCPQRLQALISPSGPSFHPSTRPSFQELRRETAGSSRTSVSQASGLLLETPVQPAFSLPKGEREVVTHSDEGGVASLGLAQRVPLRENREMSHTRDSHDSHLMPSPAPVAQPLPGHVVPCPSPFGRAQRVPSPGPPTLTSYSVLRRLTVQPKTRFTPMPSTPRVQQAQWLRGVSPQSCSEDPALPWEQVAVRLFDQESCIRSLEGSGKPPVATPSGPHSNRTPSLQEVKIQRIGILQQLLRQEVEGLVGGQCVPLNGGSSLDMVELQPLLTEISRTLNATEHNSGTSHLPGLLKHSGLPKPCLPEECGEPQPCPPAEPGPPEAFCRSEPEIPEPSLQEQLEVPEPYPPAEPRPLESCCRSEPEIPESSRQEQLEEQLEVPEPCPPAEPGPLQPSTQGQSGPPGPCPRVELGASEPCTLEHRSLESSLPPCCSQWAPATTSLIFSSQHPLCASPPICSLQSLRPPAGQAGKELAGKECEHKRSSPHCELHTCPAPTPGNLMLPHLPPWPSLALPQEEGRGCTSSPVLLIGLAVGGGGGEDSTWWKYRTPDLPLNFPCPSGLSNLAPRTLALRERLKSCLTAIHCFHEARLDDECAFYTSRAPPSGPTRVCTNPVATLLEWQDALVRLQPTAQLWLHSEPDGRWGTGTGGHLGFFTERSAGRLGYSARLAEL

SEQ ID NO: 475 - protein, 681 aa, Homo sapiens
KKKKKISQIQLNESLAHLVPQSSYARGPIPLSLPPSFSFSSFLAEAPGTIEFVADPAALATILSGEGVKSCHLGRQPSLAKRVLVRGSQGGTTQRVQGVRASAYLAPRTPTHRLDPARASCFSRLEGPGPRGRTLCPQRLQALISPSGPSFHPSTRPSFQELRRETAGSSRTSVSQASGLLLETPVQPAFSLPKGEREVVTHSDEGGVASLGLAQRVPLRENREMSHTRDSHDSHLMPSPAPVAQPLPGHVVPCPSPFGRAQRVPSPGPPTLTSYSVLRRLTVQPKTRFTPMPSTPRVQQAQWLRGVSPQSCSEDPALPWEQVAVRLFDQESCIRSLEGSGKPPVATPSGPHSNRTPSLQEVKIQRIGILQQLLRQEVEGLVGGQCVPLNGGSSLDMVELQPLLTEISRTLNATEHNSGTSHLPGLLKHSGLPKPCLPEECGEPQPCPPAEPGPPEAFCRSEPEIPEPSLQEQLEVPEPYPPAEPRPLESCCRSEPEIPESSRQEQLEEQLEVPEPCPPAEPGPLQPSTQGQSGPPGPCPRVELGASEPCTLEHRSLESSLPPCCSQWAPATTSLIFSSQHPLCASPPICSLQSLRPPAGQAGLSNLAPRTLALRERLKSCLTAIHCFHEARLDDECAFYTSRAPPSGPTRVCTNPVATLLEWQDALCFIPVGSAAPQGSP

SEQ ID NO: 476 - protein, 285 aa, Homo sapiens
MVELQPLLTEISRTLNATEHNSGTSHLPGLLKHSGLPKPCLPEECGEPQPCPPAEPGPPEAFCRSEPEIPEPSLQEQLEVPEPYPPAEPRPLESCCRSEPEIPESSRQEQLEEQLEVPEPCPPAEPGPLQPSTQGQSGPPGPCPRVELGASEPCTLEHRSLESSLPPCCSQWAPATTSLIFSSQHPLCASPPICSLQSLRPPAGQAGLSNLAPRTLALRERLKSCLTAIHCFHEARLDDECAFYTSRAPPSGPTRVCTNPVATLLEWQDALCFIPVGSAAPQGSP

SEQ ID NO: 477 - protein, 126 aa, Homo sapiens
MTTRQATKDPLLRGVSPTPSKIPVRSQKRTPFPTVTSCAVDQENQDPRRWVQKPPLNIQRPLVDSAGPRPKARHQAETSQRLVGISQPRNPLEELRPSPRGQNVGPGPPAQTGTCWSHGNTASMAE

SEQ ID NO: 478 - DNA, 1491 bp, Homo sapiens
ctcccaggcgcgtgctggctgtggtttgctttctcaatgctggtgtcctggggagctgacgtcccccagctcaggtcaggggcttgcaaaaagcctaaaatggcgatcttgggccagggactagggaaggctggggagatggggggagttctctttactgcgttttcccagttgaaaattgtttcctgcgaaacgcgatttgttgtttgtgggtctgatttgtgcgtgcggcttgggctcctgcggcttttggctcggccgggggccttgggcagcgaggctggagccggaagaggtggaggtgaagggctgcccgccacgtccctccctcctccagatgcctggcttggatggcgttggaacagggcatttggaatgttaggagataaaggcagaaaacaccacaggaaattggctgacagcaaagagcggaaggaagaagaggtgcccctatactaaacaccagacgctggaattggagaaagaatttctgttcaatatgtatttgacgcgagagcgccgcctggagattagcaagaccattaaccttacagacagacaagtcaaaatctggtttcaaaatcgcagaatgaaactcaagaaaatgaaccgagagaatcggatccgggaactgacctccaattttaatttcacctgagagcgcggcctctcctcctcccttcccgctccttcctctccccgcccctcctccctttgtgcctggtgatatatttttttttcctccctgagtataaatgcaatgcgactgcaaaaaaggcaaagacctcagactctccttccaagggacctgtggttcgtgctgcgaagatgcttccacttaaagcatgagaaatggggtgccgggatgtggggtgtggtgtgtgccctcatagatgggggtgggagtgtggctggtgtgtgtgtcaaaccctcactcacccacgcactcacacacagcattctgttctccatgcaaagttaagatcgaatccatccgcttgtaggggaaaaaaaggaaaaaaattaaccagagagggtctgtaatctcgcagagcacaggcagaatcgttccttccttgctgcatttcctccttagactaatagacgttttggaaagttcggctagtgttcgtgtgtttgtcgtagcacccagagcctccaccaaaccctctccatgtctttacctcccagtcgctctaagaatctgcttgaagtctcgtatttgtactgctttctgcttttctcccacccctcctagcacccccacatcccccatctagtaacatctcagaaatttcatccagaggaacaaaaaaattaaaaatagaacatagcaaagcaaagacagaatgcccccccccccaaatattgtcctgtccctgtctgggagttgtgttatttaaagatattctgtatgttgtatcttttgcatgtagcttccttaatggagaaaaaaaaacctaataaatttccagaatcataatcctcaaa

SEQ ID NO: 479 - DNA, 1173 bp, Homo sapiens
cctggctttcgactagcgtccgctgagctccaggctggtggcgcgtcacttagctggggaagaggagataaaggcagaaaacaccacaggaaattggctgacagcaaagagcggaaggaagaagaggtgcccctatactaaacaccagacgctggaattggagaaagaatttctgttcaatatgtatttgacgcgagagcgccgcctggagattagcaagaccattaaccttacagacagacaagtcaaaatctggtttcaaaatcgcagaatgaaactcaagaaaatgaaccgagagaatcggatccgggaactgacctccaattttaatttcacctgagagcgcggcctctcctcctcccttcccgctccttcctctccccgcccctcctccctttgtgcctggtgatatatttttttttcctccctgagtataaatgcaatgcgactgcaaaaaaggcaaagacctcagactctccttccaagggacctgtggttcgtgctgcgaagatgcttccacttaaagcatgagaaatggggtgccgggatgtggggtgtggtgtgtgccctcatagatgggggtgggagtgtggctggtgtgtgtgtcaaaccctcactcacccacgcactcacacacagcattctgttctccatgcaaagttaagatcgaatccatccgcttgtaggggaaaaaaaggaaaaaaattaaccagagagggtctgtaatctcgcagagcacaggcagaatcgttccttccttgctgcatttcctccttagactaatagacgttttggaaagttcggctagtgttcgtgtgtttgtcgtagcacccagagcctccaccaaaccctctccatgtctttacctcccagtcgctctaagaatctgcttgaagtctcgtatttgtactgctttctgcttttctcccacccctcctagcacccccacatcccccatctagtaacatctcagaaatttcatccagaggaacaaaaaaattaaaaatagaacatagcaaagcaaagacagaatgcccccccccccaaatattgtcctgtccctgtctgggagttgtgttatttaaagatattctgtatgttgtatcttttgcatgtagcttccttaatggagaaaaaaaaacctaataaatttccagaatcataatcctcaaa

SEQ ID NO: 480 - DNA, 1185 bp, Homo sapiens
ctcccaggcgcgtgctggctgtggtttgctttctcaatgctggtgtcctggggagctgacgtcccccagctcagaggagataaaggcagaaaacaccacaggaaattggctgacagcaaagagcggaaggaagaagaggtgcccctatactaaacaccagacgctggaattggagaaagaatttctgttcaatatgtatttgacgcgagagcgccgcctggagattagcaagaccattaaccttacagacagacaagtcaaaatctggtttcaaaatcgcagaatgaaactcaagaaaatgaaccgagagaatcggatccgggaactgacctccaattttaatttcacctgagagcgcggcctctcctcctcccttcccgctccttcctctccccgcccctcctccctttgtgcctggtgatatatttttttttcctccctgagtataaatgcaatgcgactgcaaaaaaggcaaagacctcagactctccttccaagggacctgtggttcgtgctgcgaagatgcttccacttaaagcatgagaaatggggtgccgggatgtggggtgtggtgtgtgccctcatagatgggggtgggagtgtggctggtgtgtgtgtcaaaccctcactcacccacgcactcacacacagcattctgttctccatgcaaagttaagatcgaatccatccgcttgtaggggaaaaaaaggaaaaaaattaaccagagagggtctgtaatctcgcagagcacaggcagaatcgttccttccttgctgcatttcctccttagactaatagacgttttggaaagttcggctagtgttcgtgtgtttgtcgtagcacccagagcctccaccaaaccctctccatgtctttacctcccagtcgctctaagaatctgcttgaagtctcgtatttgtactgctttctgcttttctcccacccctcctagcacccccacatcccccatctagtaacatctcagaaatttcatccagaggaacaaaaaaattaaaaatagaacatagcaaagcaaagacagaatgcccccccccccaaatattgtcctgtccctgtctgggagttgtgttatttaaagatattctgtatgttgtatcttttgcatgtagcttccttaatggagaaaaaaaaacctaataaatttccagaatcataatcctcaaa

SEQ ID NO: 481 - DNA, 306 bp, Homo sapiens
gtcaggggcttgcaaaaagcctaaaatggcgatcttgggccagggactagggaaggctggggagatggggggagttctctttactgcgttttcccagttgaaaattgtttcctgcgaaacgcgatttgttgtttgtgggtctgatttgtgcgtgcggcttgggctcctgcggcttttggctcggccgggggccttgggcagcgaggctggagccggaagaggtggaggtgaagggctgcccgccacgtccctccctcctccagatgcctggcttggatggcgttggaacagggcatttggaatgtt

SEQ ID NO: 482 - DNA, 501 bp, Homo sapiens
aggagataaaggcagaaaacaccacaggaaattggctgacagcaaagagcggaaggaagaagaggtgcccctatactaaacaccagacgctggaattggagaaagaatttctgttcaatatgtatttgacgcgagagcgccgcctggagattagcaagaccattaaccttacagacagacaagtcaaaatctggtttcaaaatcgcagaatgaaactcaagaaaatgaaccgagagaatcggatccgggaactgacctccaattttaatttcacctgagagcgcggcctctcctcctcccttcccgctccttcctctccccgcccctcctccctttgtgcctggtgatatatttttttttcctccctgagtataaatgcaatgcgactgcaaaaaaggcaaagacctcagactctccttccaagggacctgtggttcgtgctgcgaagatgcttccacttaaagcatgagaaatggggtgccgggatgtggggtgtggtgt

SEQ ID NO: 483 - DNA, 62 bp, Homo sapiens
cctggctttcgactagcgtccgctgagctccaggctggtggcgcgtcacttagctggggaag

SEQ ID NO: 484 - DNA, 74 bp, Homo sapiens
ctcccaggcgcgtgctggctgtggtttgctttctcaatgctggtgtcctggggagctgacgtcccccagctcag

SEQ ID NO: 485 - protein, 342 aa, Homo sapiens; identical to SEQ ID NO: 423

SEQ ID NO: 486 - protein, 342 aa, Homo sapiens; identical to SEQ ID NO: 423

SEQ ID NO: 487 - protein, 342 aa, Homo sapiens; identical to SEQ ID NO: 423

SEQ ID NO: 488 - protein, 152 aa, Homo sapiens
LPGACWLWFAFSMLVSWGADVPQLRSGACKKPKMAILGQGLGKAGEMGGVLFTAFSQLKIVSCETRFVVCGSDLCVRLGLLRLLARPGALGSEAGAGRGGGEGLPATSLPPPDAWLGWRWNRAFGMLGDKGRKHHRKLADSKERKEEEVPLY

SEQ ID NO: 489 - protein, 52 aa, Homo sapiens
MYLTRERRLEISKTINLTDRQVKIWFQNRRMKLKKMNRENRIRELTSNFNFT

SEQ ID NO: 490 - protein, 116 aa, Homo sapiens
SQARAGCGLLSQCWCPGELTSPSSEEIKAENTTGNWLTAKSGRKKRCPYTKHQTLELEKEFLFNMYLTRERRLEISKTINLTDRQVKIWFQNRRMKLKKMNRENRIRELTSNFNFT

SEQ ID NO: 491 - DNA, 3428 bp, Homo sapiens
cgcaggtgagctgcagaggcgcgcgtggtccctgccccacccgcgcggactccctcccctttttttccgccttctgccagcagaagcagcagccgcagcacctgagccgctactgccgctcactcaggacaacgctatggctgagcctgggcacagccaccatctctccgccagagtcaggggaagaactgagaggcgcataccccggctgtggcggctgctgctctgggctgggaccgccttccaggtgacccagggaacgggaccggagcttcatgcctgcaaagagtctgagtaccactatgagtacacggcgtgtgacagcacgggttccaggtggagggtcgccgtgccgcataccccgggcctgtgcaccagcctgcctgaccccgtcaagggcaccgagtgctccttctcctgcaacgccggggagtttctggatatgaaggaccagtcatgtaagccatgcgctgagggccgctactccctcggcacaggcattcggtttgatgagtgggatgagctgccccatggctttgccagcctctcagccaacatggagctggatgacagtgctgctgagtccaccgggaactgtacttcgtccaagtgggttccccggggcgactacatcgcctccaacacggacgaatgcacagccacactgatgtacgccgtcaacctgaagcaatctggcaccgttaacttcgaatactactatccagactccagcatcatctttgagtttttcgttcagaatgaccagtgccagcccaatgcagatgactccaggtggatgaagaccacagagaaaggatgggaattccacagtgtggagctaaatcgaggcaataatgtcctctattggagaaccacagccttctcagtatggaccaaagtacccaagcctgtgctggtgagaaacattgccataacaggggtggcctacacttcagaatgcttcccctgcaaacctggcacgtatgcagacaagcagggctcctctttctgcaaactttgcccagccaactcttattcaaataaaggagaaacttcttgccaccagtgtgaccctgacaaatactcagagaaaggatcttcttcctgtaacgtgcgcccagcttgcacagacaaagattatttctacacacacacggcctgcgatgccaacggagagacacaactcatgtacaaatgggccaagccgaaaatctgtagcgaggaccttgagggggcagtgaagctgcctgcctctggtgtgaagacccactgcccaccctgcaacccaggcttcttcaaaaccaacaacagcacctgccagccctgcccatatggttcctactccaatggctcagactgtacccgctgccctgcagggactgaacctgctgtgggatttgaatacaaatggtggaacacgctgcccacaaacatggaaacgaccgttctcagtgggatcaacttcgagtacaagggcatgacaggctgggaggtggctggtgatcacatttacacagctgctggagcctcagacaatgacttcatgattctcactctggttgtgccaggatttagacctccgcagtcggtgatggcagacacagagaataaagaggtggccagaatcacatttgtctttgagaccctctgttctgtgaactgtgagctctacttcatggtgggtgtgaattctaggaccaacactcctgtggagacgtggaaaggttccaaaggcaaacagtcctatacctacatcattgaggagaacactaccacgagcttcacctgggccttccagaggaccacttttcatgaggcaagcaggaagtacaccaatgacgttgccaagatctactccatcaatgtcaccaatgttatgaatggtgtggcctcctactgccgtccctgtgccctagaagcctctgatgtgggctcctcctgcacctcttgtcctgctggttactatattgaccgagattcaggaacctgccactcctgccccactaacacaattctgaaagcccaccagccttatggtgtccaggcctgtgtgccctgtggtccagggaccaagaacaacaagatccactctctgtgctacaacgattgcaccttctcacgcaacactccgaccaggactttcaactacaacttctccgctttggcaaacactgtcactcttgctggagggccaagcttcacttccaaagggctgaaatacttccatcactttaccctcagtctctgtggaaaccagggtaggaaaatgtctgtgtgcaccgacaatgtcactgacctccggattcctgagggtgagtcagggttctccaaatctatcacagcctacgtctgccaggcagtcatcatccccccagaggtgacaggctacaaggccggggtttcctcacagcctgtcagccttgctgatcgacttattggggtgacaacagatatgactctggatggaatcacctccccagctgaacttttccacctggagtccttgggaataccggacgtgatcttcttttataggtccaatgatgtgacccagtcctgcagttctgggagatcaaccaccatccgcgtcaggtgcagtccacagaaaactgtccctggaagtttgctgctgccaggaacgtgctcggatgggacctgtgatggctgcaacttccacttcctgtgggagagcgcggctgcttgcccgctctgctcagtggctgactaccatgctatcgtcagcagctgtgtggctgggatccagaagactacttacgtgtggcgagaacccaagctatgctctggtggcatttctctgcctgagcagagagtcaccatctgcaaaaccatagatttctggctgaaagtgggcatctctgcaggcacctgtactgccatcctgctcaccgtcttgacctgctacttttggaaaaagaatcaaaaactagagtacaagtactccaagctggtgatgaatgctactctcaaggactgtgacctgccagcagctgacagctgcgccatcatggaaggcgaggatgtagaggacgacctcatctttaccagcaagaagtcactctttgggaagatcaaatcatttacctccaagaggactcctgatggatttgactcagtgccgctgaagacatcctcaggaggcctagacatggacctgtgagaggcactgcctgcctcacctgcctcctcaccttgcatagcacctttgcaagcctgcggcgatttgggtgccagcatcctgcaacacccactgctggaaatctcttcattgtggccttatcagatgtttgaatttcagatctttttttatagagtacccaaaccctcctttctgcttgcctcaaacctgccaaatatacccacactttgtttgtaaattaaaaaaaaaaaaaaaaaaaaaaaaaaaaaaa

SEQ ID NO: 492 - DNA, 50 bp, Homo sapiens
agaaagtagctccagcagcacccgagagggtcaggagaaaagcggaggaa

SEQ ID NO: 493 - DNA, 50 bp, Homo sapiens
cctccagatgcctggcttggatggcgttggaacagggcatttggaatgtt

SEQ ID NO: 494 - protein, 39 aa, Artificial Organism
  Synthetic peptide
VEILQDPSPPPLCLPTTPGTPDSSDPSHLLGPQSCWSSQ

SEQ ID NO: 495 - protein, 17 aa, Artificial Organism
  Synthetic peptide
MLNRVRSAVAHLVSSGG

SEQ ID NO: 496 - protein, 167 aa, Artificial Organism
  Synthetic peptide
MLNRVRSAVAHLVSSGGAPPPRPKSPDLPNAASAPPAAAPEAPRSPPAKAGSGSATPAKAVEARASFSRPTFLQLSPGGLRRADDHAGRAVQSPPDTGRRLPWSTGYAEVINAGKSRHNEDQACCEVVYVEGRRSVTGVPREPSRGQGLCFYYWGLFDGHAGGGAAE

SEQ ID NO: 497 - protein, 39 aa, Artificial Organism; identical to SEQ ID NO: 494
  Synthetic peptide

SEQ ID NO: 498 - protein, 17 aa, Artificial Organism
  Synthetic peptide
MLNRVRSAVAHLVSSGG

SEQ ID NO: 499 - protein, 8 aa, Artificial Organism
  Synthetic peptide
VRFPFFAR

SEQ ID NO: 500 - protein, 17 aa, Artificial Organism
  Synthetic peptide
VGFPLIGHFHERREWEI

SEQ ID NO: 501 - protein, 350 aa, Artificial Organism
  Synthetic peptide
MAEPGHSHHLSARVRGRTERRIPRLWRLLLWAGTAFQVTQGTGPELHACKESEYHYEYTACDSTGSRWRVAVPHTPGLCTSLPDPVKGTECSFSCNAGEFLDMKDQSCKPCAEGRYSLGTGIRFDEWDELPHGFASLSANMELDDSAAESTGNCTSSKWVPRGDYIASNTDECTATLMYAVNLKQSGTVNFEYYYPDSSIIFEFFVQNDQCQPNADDSRWMKTTEKGWEFHSVELNRGNNVLYWRTTAFSVWTKVPKPVLVRNIAITGVAYTSECFPCKPGTYADKQGSSFCKLCPANSYSNKGETSCHQCDPDKYSEKGSSSCNVRPACTDKDYFYTHTACDANGETQL

SEQ ID NO: 502 - protein, 424 aa, Artificial Organism
  Synthetic peptide
MAEPGHSHHLSARVRGRTERRIPRLWRLLLWAGTAFQVTQGTGPELHACKESEYHYEYTACDSTGSRWRVAVPHTPGLCTSLPDPVKGTECSFSCNAGEFLDMKDQSCKPCAEGRYSLGTGIRFDEWDELPHGFASLSANMELDDSAAESTGNCTSSKWVPRGDYIASNTDECTATLMYAVNLKQSGTVNFEYYYPDSSIIFEFFVQNDQCQPNADDSRWMKTTEKGWEFHSVELNRGNNVLYWRTTAFSVWTKVPKPVLVRNIAITGVAYTSECFPCKPGTYADKQGSSFCKLCPANSYSNKGETSCHQCDPDKYSEKGSSSCNVRPACTDKDYFYTHTACDANGETQLMYKWAKPKICSEDLEGAVKLPASGVKTHCPPCNPGFFKTNNSTCQPCPYGSYSNGSDCTRCPAGTEPAVGFEYK

SEQ ID NO: 503 - protein, 21 aa, Artificial Organism
  Synthetic peptide
YMLRYWSVGMDRVGLLIRENI

SEQ ID NO: 504 - protein, 424 aa, Artificial Organism; identical to SEQ ID NO: 502
  Synthetic peptide

SEQ ID NO: 505 - protein, 55 aa, Artificial Organism
  Synthetic peptide
KSSPQVGGREVSARKVGWVESHKASYERLCPCSDLISSSAALTLLNKHGCAPKQC

SEQ ID NO: 506 - protein, 63 aa, Artificial Organism
  Synthetic peptide
ECWDRRAAGGAREQFAQALMGTETLPLMIWDFVGALHVTVTCPVPQLAKAPGPTWLALFLPPQ

SEQ ID NO: 507 - protein, 47 aa, Artificial Organism
  Synthetic peptide
VRSWALGGEQGGQGPEKVYSPNEPVLHQSSWKLHQWAQGTCLMQLQA

SEQ ID NO: 508 - protein, 40 aa, Artificial Organism
  Synthetic peptide
AAWKAGSGSAGNCEADCEGKGALLSPPGFYHQKRGQTSII

SEQ ID NO: 509 - protein, 42 aa, Artificial Organism
  Synthetic peptide
PSTRKLYEKKLVQLLVSPPCAPPVMNGPRELDGAQDSDDSEE

SEQ ID NO: 510 - protein, 23 aa, Artificial Organism
  Synthetic peptide
VSIRSFPLLRSLALCCQPGGPGV

SEQ ID NO: 511 - protein, 299 aa, Artificial Organism
  Synthetic peptide
EAPGTIEFVADPAALATILSGEGVKSCHLGRQPSLAKRVLVRGSQGGTTQRVQGVRASAYLAPRTPTHRLDPARASCFSRLEGPGPRGRTLCPQRLQALISPSGPSFHPSTRPSFQELRRETAGSSRTSVSQASGLLLETPVQPAFSLPKGEREVVTHSDEGGVASLGLAQRVPLRENREMSHTRDSHDSHLMPSPAPVAQPLPGHVVPCPSPFGRAQRVPSPGPPTLTSYSVLRRLTVQPKTRFTPMPSTPRVQQAQWLRGVSPQSCSEDPALPWVSIRSFPLLRSLALCCQPGGPGV

SEQ ID NO: 512 - protein, 8 aa, Artificial Organism
  Synthetic peptide
VSLCGQQL

SEQ ID NO: 513 - protein, 329 aa, Artificial Organism
  Synthetic peptide
EAPGTIEFVADPAALATILSGEGVKSCHLGRQPSLAKRVLVRGSQGGTTQRVQGVRASAYLAPRTPTHRLDPARASCFSRLEGPGPRGRTLCPQRLQALISPSGPSFHPSTRPSFQELRRETAGSSRTSVSQASGLLLETPVQPAFSLPKGEREVVTHSDEGGVASLGLAQRVPLRENREMSHTRDSHDSHLMPSPAPVAQPLPGHVVPCPSPFGRAQRVPSPGPPTLTSYSVLRRLTVQPKTRFTPMPSTPRVQQAQWLRGVSPQSCSEDPALPWEQVAVRLFDQESCIRSLEGSGKPPVATPSGPHSNRTPSLQEVKIQVSLCGQQL

SEQ ID NO: 514 - protein, 90 aa, Artificial Organism
  Synthetic peptide
GKELAGKECEHKRSSPHCELHTCPAPTPGNLMLPHLPPWPSLALPQEEGRGCTSSPVLLIGLAVGGGGGEDSTWWKYRTPDLPLNFPCPS

SEQ ID NO: 515 - protein, 727 aa, Artificial Organism
  Synthetic peptide
EAPGTIEFVADPAALATILSGEGVKSCHLGRQPSLAKRVLVRGSQGGTTQRVQGVRASAYLAPRTPTHRLDPARASCFSRLEGPGPRGRTLCPQRLQALISPSGPSFHPSTRPSFQELRRETAGSSRTSVSQASGLLLETPVQPAFSLPKGEREVVTHSDEGGVASLGLAQRVPLRENREMSHTRDSHDSHLMPSPAPVAQPLPGHVVPCPSPFGRAQRVPSPGPPTLTSYSVLRRLTVQPKTRFTPMPSTPRVQQAQWLRGVSPQSCSEDPALPWEQVAVRLFDQESCIRSLEGSGKPPVATPSGPHSNRTPSLQEVKIQRIGILQQLLRQEVEGLVGGQCVPLNGGSSLDMVELQPLLTEISRTLNATEHNSGTSHLPGLLKHSGLPKPCLPEECGEPQPCPPAEPGPPEAFCRSEPEIPEPSLQEQLEVPEPYPPAEPRPLESCCRSEPEIPESSRQEQLEEQLEVPEPCPPAEPGPLQPSTQGQSGPPGPCPRVELGASEPCTLEHRSLESSLPPCCSQWAPATTSLIFSSQHPLCASPPICSLQSLRPPAGQAGKELAGKECEHKRSSPHCELHTCPAPTPGNLMLPHLPPWPSLALPQEEGRGCTSSPVLLIGLAVGGGGGEDSTWWKYRTPDLPLNFPCPSGLSNLAPRTLALRERLKSCLTAIHCFHEARLDDECAFYTSRAPPSGPTRVCTNPVATLLEWQDALCFIPVGSAAPQGSP

SEQ ID NO: 516 - protein, 90 aa, Artificial Organism; identical to SEQ ID NO: 514
  Synthetic peptide

SEQ ID NO: 517 - protein, 756 aa, Artificial Organism
  Synthetic peptide
EAPGTIEFVADPAALATILSGEGVKSCHLGRQPSLAKRVLVRGSQGGTTQRVQGVRASAYLAPRTPTHRLDPARASCFSRLEGPGPRGRTLCPQRLQALISPSGPSFHPSTRPSFQELRRETAGSSRTSVSQASGLLLETPVQPAFSLPKGEREVVTHSDEGGVASLGLAQRVPLRENREMSHTRDSHDSHLMPSPAPVAQPLPGHVVPCPSPFGRAQRVPSPGPPTLTSYSVLRRLTVQPKTRFTPMPSTPRVQQAQWLRGVSPQSCSEDPALPWEQVAVRLFDQESCIRSLEGSGKPPVATPSGPHSNRTPSLQEVKIQRIGILQQLLRQEVEGLVGGQCVPLNGGSSLDMVELQPLLTEISRTLNATEHNSGTSHLPGLLKHSGLPKPCLPEECGEPQPCPPAEPGPPEAFCRSEPEIPEPSLQEQLEVPEPYPPAEPRPLESCCRSEPEIPESSRQEQLEVPEPCPPAEPRPLESYCRIEPEIPESSRQEQLEVPEPCPPAEPGPLQPSTQGQSGPPGPCPRVELGASEPCTLEHRSLESSLPPCCSQWAPATTSLIFSSQHPLCASPPICSLQSLRPPAGQAGKELAGKECEHKRSSPHCELHTCPAPTPGNLMLPHLPPWPSLALPQEEGRGCTSSPVLLIGLAVGGGGGEDSTWWKYRTPDLPLNFPCPSGLSNLAPRTLALRERLKSCLTAIHCFHEARLDDECAFYTSRAPPSGPTRVCTNPVATLLEWQDALCFIPVGSAAPQGSP

SEQ ID NO: 518 - protein, 47 aa, Artificial Organism
  Synthetic peptide
VRLQPTAQLWLHSEPDGRWGTGTGGHLGFFTERSAGRLGYSARLAEL

SEQ ID NO: 519 - protein, 670 aa, Artificial Organism
  Synthetic peptide
EAPGTIEFVADPAALATILSGEGVKSCHLGRQPSLAKRVLVRGSQGGTTQRVQGVRASAYLAPRTPTHRLDPARASCFSRLEGPGPRGRTLCPQRLQALISPSGPSFHPSTRPSFQELRRETAGSSRTSVSQASGLLLETPVQPAFSLPKGEREVVTHSDEGGVASLGLAQRVPLRENREMSHTRDSHDSHLMPSPAPVAQPLPGHVVPCPSPFGRAQRVPSPGPPTLTSYSVLRRLTVQPKTRFTPMPSTPRVQQAQWLRGVSPQSCSEDPALPWEQVAVRLFDQESCIRSLEGSGKPPVATPSGPHSNRTPSLQEVKIQRIGILQQLLRQEVEGLVGGQCVPLNGGSSLDMVELQPLLTEISRTLNATEHNSGTSHLPGLLKHSGLPKPCLPEECGEPQPCPPAEPGPPEAFCRSEPEIPEPSLQEQLEVPEPYPPAEPRPLESCCRSEPEIPESSRQEQLEEQLEVPEPCPPAEPGPLQPSTQGQSGPPGPCPRVELGASEPCTLEHRSLESSLPPCCSQWAPATTSLIFSSQHPLCASPPICSLQSLRPPAGQAGLSNLAPRTLALRERLKSCLTAIHCFHEARLDDECAFYTSRAPPSGPTRVCTNPVATLLEWQDALVRLQPTAQLWLHSEPDGRWGTGTGGHLGFFTERSAGRLGYSARLAEL

SEQ ID NO: 520 - protein, 90 aa, Artificial Organism; identical to SEQ ID NO: 514
  Synthetic peptide

SEQ ID NO: 521 - protein, 47 aa, Artificial Organism; identical to SEQ ID NO: 518
  Synthetic peptide

SEQ ID NO: 522 - protein, 760 aa, Artificial Organism
  Synthetic peptide
EAPGTIEFVADPAALATILSGEGVKSCHLGRQPSLAKRVLVRGSQGGTTQRVQGVRASAYLAPRTPTHRLDPARASCFSRLEGPGPRGRTLCPQRLQALISPSGPSFHPSTRPSFQELRRETAGSSRTSVSQASGLLLETPVQPAFSLPKGEREVVTHSDEGGVASLGLAQRVPLRENREMSHTRDSHDSHLMPSPAPVAQPLPGHVVPCPSPFGRAQRVPSPGPPTLTSYSVLRRLTVQPKTRFTPMPSTPRVQQAQWLRGVSPQSCSEDPALPWEQVAVRLFDQESCIRSLEGSGKPPVATPSGPHSNRTPSLQEVKIQRIGILQQLLRQEVEGLVGGQCVPLNGGSSLDMVELQPLLTEISRTLNATEHNSGTSHLPGLLKHSGLPKPCLPEECGEPQPCPPAEPGPPEAFCRSEPEIPEPSLQEQLEVPEPYPPAEPRPLESCCRSEPEIPESSRQEQLEEQLEVPEPCPPAEPGPLQPSTQGQSGPPGPCPRVELGASEPCTLEHRSLESSLPPCCSQWAPATTSLIFSSQHPLCASPPICSLQSLRPPAGQAGKELAGKECEHKRSSPHCELHTCPAPTPGNLMLPHLPPWPSLALPQEEGRGCTSSPVLLIGLAVGGGGGEDSTWWKYRTPDLPLNFPCPSGLSNLAPRTLALRERLKSCLTAIHCFHEARLDDECAFYTSRAPPSGPTRVCTNPVATLLEWQDALVRLQPTAQLWLHSEPDGRWGTGTGGHLGFFTERSAGRLGYSARLAEL

SEQ ID NO: 523 - protein, 44 aa, Artificial Organism
  Synthetic peptide
KKKKKISQIQLNESLAHLVPQSSYARGPIPLSLPPSFSFSSFLA

SEQ ID NO: 524 - DNA, 50 bp, Homo sapiens; identical to SEQ ID NO: 292

SEQ ID NO: 525 - DNA, 50 bp, Homo sapiens; identical to SEQ ID NO: 293

SEQ ID NO: 526 - DNA, 50 bp, Homo sapiens; identical to SEQ ID NO: 294

SEQ ID NO: 527 - DNA, 50 bp, Homo sapiens; identical to SEQ ID NO: 295

SEQ ID NO: 528 - DNA, 50 bp, Homo sapiens; identical to SEQ ID NO: 296

SEQ ID NO: 529 - DNA, 50 bp, Homo sapiens; identical to SEQ ID NO: 492

SEQ ID NO: 530 - DNA, 50 bp, Homo sapiens; identical to SEQ ID NO: 493

SEQ ID NO: 531 - protein, 27 aa, Artificial Organism
  Synthetic peptide
MSDLFIGFLVCSLSPLGTGTRCSCSPG

SEQ ID NO: 532 - protein, 69 aa, Artificial Organism
  Synthetic peptide
DCGFPAFRELKRAETVSPVFFTRRCIWEDLKSTGFSPAGGGRPPGGGPRTQEDSGLPCWRSSCSVTLQV

SEQ ID NO: 533 - protein, 24 aa, Artificial Organism
  Synthetic peptide
SQARAGCGLLSQCWCPGELTSPSS

SEQ ID NO: 534 - protein, 14 aa, Artificial Organism
  Synthetic peptide
GTCWSHGNTASMAE

1-62. (canceled)

63. An isolated polynucleotide comprising a nucleic acid sequence set forth in a member selected from the group consisting of SEQ ID NOs: 1-3, 334 and homologues and fragments thereof.

64. The polynucleotide of claim 63, wherein the nucleic acid sequence encodes a polypeptide having an amino acid sequence set forth in a member selected from the group consisting of SEQ ID NOs: 33-36.

65. The polynucleotide of claim 63, wherein the nucleic acid sequence encodes a polypeptide comprising contiguous amino acids having at least about 70%, 80%, 85%, 90%, 95% or 100% homology to SEQ ID NO:494

66. The polynucleotide of claim 63, wherein the nucleic acid sequence encodes a polypeptide comprising contiguous amino acids having at least about 70%, 80%, 85%, 90%, 95% or 100% homology to SEQ ID NO: 495

67. The polynucleotide of claim 63, wherein the nucleic acid sequence encodes a polypeptide comprising contiguous amino acids having at least about 70%, 80%, 85%, 90%, 95% or 100% homology to SEQ ID NO: 496.

68. The polynucleotide of claim 63, wherein the nucleic acid sequence encodes a polypeptide comprising contiguous amino acids having at least about 70%, 80%, 85%, 90%, 95% or 100% homology to SEQ ID NO: 497.

69. The polynucleotide of claim 63, wherein the nucleic acid sequence encodes a polypeptide comprising contiguous amino acids having at least about 70%, 80%, 85%, 90%, 95% or 100% homology to SEQ ID NO: 498.

70. An isolated polynucleotide, comprising a nucleic acid sequence complementary to any one of the nucleic acid sequences of claim 63.

71. An isolated polynucleotide, comprising a nucleic acid sequence that hybridizes under stringent conditions to any one of the nucleic acid sequences of claim 63.

72. An isolated polypeptide having an amino acid sequence encoded by the nucleic acid sequence of claim 63.

73. An isolated polypeptide having an amino acid sequence as set forth in any one of SEQ ID NOs: 33-36.

74. The polypeptide of claim 72, comprising a first portion having an amino acid sequence being at least about 90% homologous to amino acids 1-17 of SEQ ID NO: 33, a second portion having amino acid sequence being at least about 70%, 80%, 85%, 90%, 95% or 100% homologous to SEQ ID NO: 494, and a third portion having amino acid sequence being at least about 90% homologous to amino acids 57-290 of SEQ ID NO: 33, wherein the first amino acid sequence, the second amino acid sequence and the third amino acid sequence are contiguous and in a sequential order.

75. The polypeptide of claim 72, comprising a first portion having an amino acid sequence being at least about 70%, 80%, 85%, 90%, 95% or 100% homologous to SEQ ID NO: 495, and a second portion having an amino acid sequence being at least about 90% homologous to amino acids 18-457 of SEQ ID NO: 34, wherein the first amino acid sequence and the second amino acid sequence are contiguous and in a sequential order.

76. The polypeptide of claim 72, comprising a first portion having amino acid sequence being at least about 70%, 80%, 85%, 90%, 95% or 100% homologous to SEQ ID NO: 496, a second portion having amino acid sequence being at least about 90% homologous to amino acids 168-184 of SEQ ID NO: 34, a third portion having amino acid sequence being at least about at least about 70%, 80%, 85%, 90%, 95% or 100% homologous to SEQ ID NO: 494, and a fourth portion having amino acid sequence being at least about 90% homologous to acids 224-457 of SEQ ID NO: 34, wherein the first amino acid sequence, the second amino acid sequence, the third amino acid sequence and the fourth amino acid sequence are contiguous and in a sequential order.

77. The polypeptide of claim 72, comprising a first portion having an amino acid sequence being at least about 70%, 80%, 85%, 90%, 95% or 100% homologous to SEQ ID NO: 495, a second portion having amino acid sequence being at least about 90% homologous to amino acids 18-349 of SEQ ID NO: 36, and a third portion having amino acid sequence LG corresponding to amino acids 350-351 of SEQ ID NO: 36, wherein the first amino acid sequence, the second amino acid sequence and the third amino acid sequence are contiguous and in a sequential order.

78. A polypeptide comprising an amino acid sequence at least about 70%, 80%, 85%, 90%, 95% or 100% homologous to SEQ ID NO:494.

79. A polypeptide comprising an amino acid sequence at least about 70%, 80%, 85%, 90%, 95% or 100% homologous to SEQ ID NO:495.

80. A polypeptide comprising an amino acid sequence at least about 70%, 80%, 85%, 90%, 95% or 100% homologous to SEQ ID NO:496.

81. A polypeptide comprising an amino acid sequence at least about 70%, 80%, 85%, 90%, 95% or 100% homologous to SEQ ID NO:497.

82. A polypeptide comprising an amino acid sequence at least about 70%, 80%, 85%, 90%, 95% or 100% homologous to SEQ ID NO:498.

83. An antibody which binds to at least one epitope of a polypeptide having an amino acid sequence according to claim 72.

84. The antibody of claim 83, wherein said antibody is capable of differentiating between a splice variant having said epitope and a corresponding known protein.

85. An expression vector comprising the polynucleotide sequence according to claim 63.

86. A host cell comprising the vector according to claim 85.

87. A process for producing a polypeptide comprising: culturing the host cell according to claim 86 under conditions suitable to produce the polypeptide encoded by said polynucleotide; and recovering said polypeptide.

88. An isolated polynucleotide segment, comprising a nucleic acid sequence selected from the group consisting of: SEQ ID NOs: 4-28.

89. An isolated polynucleotide segment comprising a nucleic acid sequence complementary to any one of the nucleic acid sequences of the segments of claim 88.

90. An isolated polynucleotide segment comprising a nucleic acid sequence that hybridizes under stringent conditions to any one of the nucleic acid sequences of the segments of claim 88.

91. A kit for detecting cancer, comprising a marker capable of detecting at least one polypeptide according to claim 72 or a part thereof.

92. The kit of claim 91, wherein said kit comprises an antibody according to claim 18 and wherein said kit further comprises at least one reagent for performing an immunoassay.

93. The kit of claim 92, wherein said immunoassay is selected from the group consisting of an ELISA, a RIA (radio immunoassay), a slot blot, immunohistochemical assay, FACS (fluorescence activated cell sorting), a radio-imaging assay or a Western blot.

94. The kit of claim 91, wherein the cancer is breast cancer.

95. The kit of claim 91, wherein the cancer is invasive or metastatic.

96. The kit of claim 94, wherein the breast cancer comprises cancers of the breast or surrounding tissue, or an indicative condition.

97. The kit of claim 96, wherein the breast cancer is selected from the group consisting of ductal carcinoma (in-situ or invasive), lobular carcinoma (in situ or invasive), inflammatory breast cancer, mucinous carcinoma, tubular carcinoma, or Paget's disease of the nipple.

98. The kit of claim 96, wherein the indicative condition is selected from the group consisting of ductal hyperplasia without atypia and atypical hyperplasia.

99. A kit for detecting cancer, comprising a marker capable of detecting at least one polynucleotide according to claim 63.

100. The kit of claim 99, wherein said kit comprises at least one nucleotide probe or primer pair.

101. The kit of claim 100, wherein said kit comprises at least one oligonucleotide capable of selectively hybridizing to a nucleic acid sequence as set forth in any one of SEQ ID NOs:1-28, 334, 358, 361, or a homologue or fragment thereof.

102. The kit of claim 100, wherein said at least one primer pair amplifies an amplicon comprising the sequence as set forth in SEQ ID NO:358 or 361.

103. The primer pair of claim 102, comprising a pair of isolated oligonucleotides selected from the group consisting of SEQ ID NO:356 and SEQ ID NO:357; and SEQ ID NO:359 and SEQ ID NO:360.

104. The kit of claim 99, wherein said kit comprises at least one oligonucleotide capable of selectively hybridizing to a polynucleotide according to claim 1.

105. A method for detecting cancer and/or monitoring disease progression and/or monitoring treatment efficacy and/or detecting acute or chronic exacerbation of cancer and/or selecting a therapy for cancer comprising detecting in a sample differential expression of at least one polypeptide according to claim 72 or a part thereof.

106. The method of claim 105, wherein the cancer is breast cancer.

107. The method of claim 106, wherein said cancer is invasive or metastatic.

108. The method of claim 106, wherein the breast cancer comprises cancers of the breast or surrounding tissue, or an indicative condition.

109. The method of claim 108, wherein the breast cancer is selected from the group consisting of ductal carcinoma (in-situ or invasive), lobular carcinoma (in situ or invasive), inflammatory breast cancer, mucinous carcinoma, tubular carcinoma, or Paget's disease of the nipple.

110. The method of claim 108, wherein the indicative condition is selected from the group consisting of ductal hyperplasia without atypia and atypical hyperplasia.

111. The method of claim 105, wherein detecting the differential expression of the polypeptide is performed with an antibody which binds to at least one epitope of a polypeptide of at least 70%, 80%, 85%, 95%, or 100% homologous to SEQ ID NOS:494-498.

112. A method for detecting cancer and/or monitoring disease progression and/or monitoring treatment efficacy and/or detecting acute or chronic exacerbation of cancer and/or selecting a therapy for cancer comprising detecting in a sample differential expression of at least one polynucleotide according to claim 63 or a part thereof.

113. The method of claim 112, wherein the cancer is breast cancer.

114. The method of claim 113, wherein said cancer is invasive or metastatic.

115. The method of claim 113, wherein the breast cancer comprises cancers of the breast or surrounding tissue, or an indicative condition.

116. The method of claim 115, wherein the breast cancer is selected from the group consisting of ductal carcinoma (in-situ or invasive), lobular carcinoma (in situ or invasive), inflammatory breast cancer, mucinous carcinoma, tubular carcinoma, or Paget's disease of the nipple.

117. The method of claim 115, wherein the indicative condition is selected from the group consisting of ductal hyperplasia without atypia and atypical hyperplasia.
